(19) United States
(12) Patent Application Publication
(10) Pub. No.: US 2026/0055420 A1
(43) Pub. Date: Feb. 26, 2026

(54) CIS-ACTING REGULATORY ELEMENTS

(71) Applicant: PIONEER HI-BRED INTERNATIONAL, INC., JOHNSTON, IA (US)

(72) Inventors: MONIQUE COY, ANKENY, IA (US); SUNIL KUMAR, HYDERABAD (IN)

(73) Assignee: PIONEER HI-BRED INTERNATIONAL, INC., JOHNSTON, IA (US)

(21) Appl. No.: 19/333,912

(22) Filed: Sep. 19, 2025

Related U.S. Application Data
(62) Division of application No. 17/905,293.
(60) Provisional application No. 62/984,831, filed on Mar. 4, 2020.

(51) Int. Cl. C12N 15/82

(52) U.S. Cl. CPC C12N 15/8217

(57) ABSTRACT

Cis-acting regulatory elements were identified and engineered as a modulating element within a regulatory element (for example, a promoter, 5′UTR, intron or 3′UTR). Next, the chimeric cis-acting regulatory element and promoter were assayed to determine if the cis-acting regulatory elements could enhance the expression of a downstream coding sequence operably linked to the chimeric cis-acting regulatory element and promoter. Disclosed are novel cis-acting regulatory elements that were identified to enhance the expression of a downstream coding sequence.

### CROSS-REFERENCE TO RELATED APPLICATION

[0001] This application is a divisional application of U.S. patent application Ser. No. 17/905,293 (published as U.S. Patent Publication No. 2025-0179512; ), filed Aug. 30, 2022, which claims the benefit of the filing date of U.S. Provisional Patent Application Ser. No. 62/984,831, filed Mar. 4, 2020, the disclosures of which are hereby incorporated by reference in their entirety.

### REFERENCE TO A SEQUENCE LISTING

[0002] The official copy of the sequence listing is submitted electronically via EFS-Web as an XML formatted sequence listing with a file named “8424-WO-PCT-Sequence listing XML File.xml”, created on Nov. 6, 2025, and having a size of 1,950,751 bytes and is filed concurrently with the specification. The sequence listing contained in this XML formatted document is part of the specification and is herein incorporated by reference in its entirety.

### FIELD OF THE INVENTION

[0003] This disclosure is generally related to the field of molecular biology, and in particular embodiments to cis-acting regulatory elements that can be engineered in proximity to a coding sequence such that the expression of the coding sequence is increased. In certain aspects, the cis-acting elements are engineered with a regulatory element (for example a promoter, 5′UTR, intron or 3′UTR) to produce a novel chimeric sequence. In other aspects, the novel chimeric sequence comprised of a cis-acting regulatory element and another regulatory element (for example a promoter, 5′UTR, intron or 3′UTR) drive higher levels of expression of a coding sequence. In further aspects, the cis-acting regulatory element functions within a living cell (for example a plant cell) to drive higher levels of expression of a coding sequence. Accordingly, this disclosure provides compositions and methods for the identification, detection and utilization of such a cis-acting regulatory element.

### BACKGROUND

[0004] Many plant species are capable of being transformed with transgenes to introduce agronomically desirable traits or characteristics. The resulting plant species are developed and/or modified to have particular desirable traits. Generally, desirable traits include, for example, improving nutritional value quality, increasing yield, conferring pest or disease resistance, increasing drought and stress tolerance, improving horticultural qualities (e.g., pigmentation and growth), imparting herbicide tolerance, enabling the production of industrially useful compounds and/or materials from the plant, and/or enabling the production of pharmaceuticals.

[0005] Transgenic plant species comprising multiple transgenes stacked at a single genomic locus are produced via plant transformation technologies. Plant transformation technologies result in the introduction of a transgene into a plant cell, recovery of a fertile transgenic plant that contains the stably integrated copy of the transgene in the plant genome, and subsequent transgene expression via transcription and translation results in transgenic plants that possess desirable traits and phenotypes. However, novel gene regulatory elements that allow the production of transgenic plant species to highly express multiple transgenes engineered as a trait stack are desirable.

[0006] Likewise, novel gene regulatory elements that allow the expression of a transgene within particular tissues or organs of a plant are desirable. For example, increased resistance of a plant to infection by soil-borne pathogens might be accomplished by transforming the plant genome with a pathogen-resistance gene such that pathogen-resistance protein is robustly expressed within the roots of the plant. Alternatively, it may be desirable to express a transgene in plant tissues that are in a particular growth or developmental phase such as, for example, cell division or elongation. Furthermore, it may be desirable to express a transgene in leaf and stem tissues of a plant to provide tolerance against herbicides, or resistance against above ground insects and pests.

[0007] Therefore, a need exists for new gene regulatory elements that can drive the desired levels of expression of transgenes in specific plant tissues. Accordingly, there remains a need for compositions and methodologies to increase expression of a coding sequence such that the expression of the coding sequence is robustly driven by cis-acting regulating and other regulatory elements (for example a promoter).

### SUMMARY

[0008] Disclosed herein are sequences, constructs, and methods for a chimeric regulatory molecule wherein the molecule comprises a nucleic acid sequence comprising at least 90%, 91%, 92%, 93%, 94%, 95%, 96%, 97%, 98%, 99%, or 100% identity to SEQ ID NO:9, SEQ ID NOs:25-583, SEQ ID NOs:585-2268. In some aspects the chimeric regulatory molecule comprises SEQ ID NO:9, SEQ ID NOs:25-583, SEQ ID NOs:585-2268. In other aspects the chimeric regulatory molecule consists of SEQ ID NO:9, SEQ ID NOs:25-583, SEQ ID NOs:585-2268. In further aspects, the nucleic acid sequence comprising at least 90%, 91%, 92%, 93%, 94%, 95%, 96%, 97%, 98%, 99%, or 100% identity to SEQ ID NO:9, SEQ ID NOs:25-583, SEQ ID NOs:585-2268 functions as an enhancer. In additional aspects, the nucleic acid sequence comprising at least 90%, 91%, 92%, 93%, 94%, 95%, 96%, 97%, 98%, 99%, or 100% identity to SEQ ID NO:9, SEQ ID NOs:25-583, SEQ ID NOs:585-2268 functions as a repressor. In some aspects the chimeric regulatory molecule comprises a promoter operably linked to the nucleic acid sequence comprising at least 90%, 91%, 92%, 93%, 94%, 95%, 96%, 97%, 98%, 99%, or 100% identity to SEQ ID NO:9, SEQ ID NOs:25-583, SEQ ID NOs:585-2268. In further aspects the chimeric regulatory molecule comprises an intron operably linked to the nucleic acid sequence comprising at least 90%, 91%, 92%, 93%, 94%, 95%, 96%, 97%, 98%, 99%, or 100% identity to SEQ ID NO:9, SEQ ID NOs:25-583, SEQ ID NOs:585-2268. In other aspects the chimeric regulatory molecule comprises an 5′ UTR operably linked to the nucleic acid sequence comprising at least 90%, 91%, 92%, 93%, 94%, 95%, 96%, 97%, 98%, 99%, or 100% identity to SEQ ID NO:9, SEQ ID NOs:25-583, SEQ ID NOs:585-2268. In additional aspects the nucleic acid sequence comprising at least 90%, 91%, 92%, 93%, 94%, 95%, 96%, 97%, 98%, 99%, or 100% identity to SEQ ID NO:9, SEQ ID NOs:25-583, SEQ ID NOs:585-2268. is provided as two or more copies.

[0009] Further disclosed herein is a gene expression cassette comprising the chimeric regulatory molecule, wherein the molecule comprises a nucleic acid sequence comprising at least 90%, 91%, 92%, 93%, 94%, 95%, 96%, 97%, 98%, 99%, or 100% identity to SEQ ID NO:9, SEQ ID NOs:25-583, SEQ ID NOs:585-2268. In some aspects the nucleic acid sequence comprising at least 90%, 91%, 92%, 93%, 94%, 95%, 96%, 97%, 98%, 99%, or 100% identity to SEQ ID NO:9, SEQ ID NOs:25-583, SEQ ID NOs:585-2268 is operably linked to a promoter, intron, of 5′UTR. In other aspects the chimeric regulatory molecule is operably linked to a heterologous coding sequence. In further aspects the heterologous coding sequence is a gene of interest. Examples of the gene of interest includes a selectable marker protein, an insecticidal resistance protein, a herbicide tolerance protein, a nitrogen use efficiency protein, a water use efficiency protein, a small RNA molecule, a nutritional quality protein, or a DNA binding protein. In further aspects the gene expression cassette is engineered within a recombinant vector. Examples of a vector include a plasmid, a cosmid, a bacterial artificial chromosome, a virus, and a bacteriophage. In additional aspects the nucleic acid sequence comprising at least 90%, 91%, 92%, 93%, 94%, 95%, 96%, 97%, 98%, 99%, or 100% identity SEQ ID NO:9, SEQ ID NOs:25-583, SEQ ID NOs:585-2268 is provided as two or more copies.

[0010] Disclosed herein is a transgenic plant cell comprising a chimeric regulatory molecule wherein the molecule comprises a nucleic acid sequence comprising at least 90%, 91%, 92%, 93%, 94%, 95%, 96%, 97%, 98%, 99%, or 100% identity SEQ ID NO:9, SEQ ID NOs:25-583, SEQ ID NOs:585-2268. In some aspects the transgenic plant cell comprises a gene expression cassette that comprises a chimeric regulatory molecule wherein the molecule comprises a nucleic acid sequence comprising at least 90%, 91%, 92%, 93%, 94%, 95%, 96%, 97%, 98%, 99%, or 100% identity to SEQ ID NO:9, SEQ ID NOs:25-583, SEQ ID NOs:585-2268. In other aspects the transgenic plant cell is a monocotyledonous plant. In further aspects the transgenic plant cell is a dicotyledonous plant. In additional aspects the gene expression cassette is expressed constitutively. In other aspects the transgenic plant is stably transformed with the gene expression cassette. In some aspects the transgenic plant is transiently transformed with the gene expression cassette. In additional aspects a seed comprising the gene expression cassette is developed from the transgenic plant. In further aspects a progeny plant comprising the gene expression cassette is developed from the transgenic plant.

[0011] Disclosed herein is a method for inhibiting weed growth in a field of transgenic herbicide tolerant crop plants comprising planting the transgenic plants transformed with a gene expression cassette comprising a chimeric regulatory molecule wherein the molecule comprises a nucleic acid sequence comprising at least 90%, 91%, 92%, 93%, 94%, 95%, 96%, 97%, 98%, 99%, or 100% identity to SEQ ID NO:9, SEQ ID NOs:25-583, SEQ ID NOs:585-2268, active in a plant cell and operably linked to a polynucleotide molecule encoding an herbicide tolerance gene; and applying herbicide to the field at an application rate that inhibits the growth of weeds, wherein the growth and yield of the transgenic crop plant is not substantially affected by the herbicide application. Disclosed herein is a method for providing pest control in a field of transgenic crop plants, the method comprising the steps of planting the transgenic plants transformed with a gene expression cassette comprising a chimeric regulatory molecule wherein the molecule comprises a nucleic acid sequence comprising at least 90%, 91%, 92%, 93%, 94%, 95%, 96%, 97%, 98%, 99%, or 100% identity to SEQ ID NO:9, SEQ ID NOs:25-583, SEQ ID NOs:585-2268, active in a plant cell and operably linked to a gene conferring pest resistance. Disclosed herein is a method for providing disease control in a field of transgenic crop plants, the method comprising the steps of planting the transgenic plants transformed with a gene expression cassette comprising at least 90%, 91%, 92%, 93%, 94%, 95%, 96%, 97%, 98%, 99%, or 100% identity to SEQ ID NO:9, SEQ ID NOs:25-583, SEQ ID NOs:585-2268, active in a plant cell and operably linked to a gene conferring disease resistance. Disclosed herein, is a method of providing stress tolerance to plants in a field of transgenic crop plants, the method comprising the steps of planting the transgenic plants transformed with a gene expression cassette comprising at least 90%, 91%, 92%, 93%, 94%, 95%, 96%, 97%, 98%, 99%, or 100% identity to SEQ ID NO:9, SEQ ID NOs:25-583, SEQ ID NOs:585-2268, active in a plant cell and operably linked to a gene conferring stress tolerance. Disclosed herein is a method of providing yield enhancement to plants in a field of transgenic crop plants, the method comprising the steps of planting the transgenic plants transformed with a gene expression cassette comprising at least 90%, 91%, 92%, 93%, 94%, 95%, 96%, 97%, 98%, 99%, or 100% identity to SEQ ID NO:9, SEQ ID NOs:25-583, SEQ ID NOs:585-2268, active in a plant cell and operably linked to a gene conferring yield enhancement.

[0012] Disclosed herein is a method for transforming a host cell, the method comprising the steps of: providing a chimeric regulatory molecule comprising a polynucleotide that shares at least 90%, 91%, 92%, 93%, 94%, 95%, 96%, 97%, 98%, 99%, or 100% identity to SEQ ID NO:9, SEQ ID NOs:25-583, SEQ ID NOs:585-2268 wherein said molecule is operably linked to a heterologous coding sequence, and transforming said cell with the nucleic acid molecule. In some aspects, the plant transformation method is selected from an Agrobacterium-mediated transformation method, a biolistics transformation method, a silicon carbide transformation method, a protoplast transformation method, and a liposome transformation method. Disclosed herein is a method for producing a transgenic plant cell, the method comprising the steps of: transforming a plant cell with a gene expression cassette comprising a chimeric regulatory molecule comprising a polynucleotide that shares at least 90%, 91%, 92%, 93%, 94%, 95%, 96%, 97%, 98%, 99%, or 100% identity to SEQ ID NO:9, SEQ ID NOs:25-583, SEQ ID NOs:585-2268 operably linked to at least one polynucleotide sequence of interest; isolating the transformed plant cell comprising the gene expression cassette; and, producing a transgenic plant cell comprising the chimeric regulatory molecule a chimeric regulatory molecule comprising a polynucleotide that shares at least 90%, 91%, 92%, 93%, 94%, 95%, 96%, 97%, 98%, 99%, or 100% identity to SEQ ID NO:9, SEQ ID NOs:25-583, SEQ ID NOs:585-2268 operably linked to at least one polynucleotide sequence of interest. In some aspect the plant cell is transformed with a plant transformation method. In other aspects, the plant transformation method is selected from an Agrobacterium-mediated transformation method, a biolistics transformation method, a silicon carbide transformation method, a protoplast transformation method, and a liposome transformation method. In further aspect the polynucleotide sequence of interest is expressed in a plant cell. In additional aspects the polynucleotide sequence of interest is stably integrated into the genome of the transgenic plant cell. In other aspect the polynucleotide sequence of interest is transiently integrated into the genome of the transgenic plant cell. In further aspects the method further comprising the steps of: regenerating the transgenic plant cell into a transgenic plant; and, obtaining the transgenic plant, wherein the transgenic plant comprises the gene expression cassette comprising the chimeric regulatory molecule of claim 1 operably linked to at least one polynucleotide sequence of interest. In additional aspects the transgenic plant cell is a monocotyledonous transgenic plant cell or a dicotyledonous transgenic plant cell. In still other aspects the polynucleotide sequence of interest is a trait selected from the group consisting of an insecticidal resistance trait, herbicide tolerance trait, nitrogen use efficiency trait, water use efficiency trait, nutritional quality trait, DNA binding trait, selectable marker trait, small RNA trait, or any combination thereof. In other aspect the polynucleotide that shares at least 90%, 91%, 92%, 93%, 94%, 95%, 96%, 97%, 98%, 99%, or 100% identity to SEQ ID NO:9, SEQ ID NOs:25-583, SEQ ID NOs:585-2268 is provided in two or more copies.

[0013] Disclosed herein is a transgenic plant stably transformed with a polynucleotide molecule comprising: a chimeric regulatory molecule comprising a nucleic acid sequence selected from the group consisting of: a nucleic acid sequence comprising at least 90%, 91%, 92%, 93%, 94%, 95%, 96%, 97%, 98%, 99%, or 100% identity to SEQ ID NO:9, SEQ ID NOs:25-583, SEQ ID NOs:585-2268 and has promoter activity; a fragment comprising at least 4-33 contiguous nucleotides of SEQ ID NO:9, SEQ ID NOs:25-583, SEQ ID NOs:585-2268 and has promoter activity; and the nucleic acid sequence of SEQ ID NO:9, SEQ ID NOs:25-583, SEQ ID NOs:585-2268; a heterologous coding sequence, wherein the chimeric regulatory molecule is operably linked to the heterologous coding sequence. In some aspects the transgenic plant is transformed with a plant transformation method. Exemplary plant transformation methods include Agrobacterium-mediated transformation method, a biolistics transformation method, a silicon carbide transformation method, a protoplast transformation method, and a liposome transformation method. In other aspects the heterologous coding sequence is expressed in a cell of the transgenic plant. In further aspects the transgenic plant is a monocotyledonous transgenic plant cell or a dicotyledonous transgenic plant cell. Exemplary heterologous coding sequences include a trait selected from the group consisting of an insecticidal resistance trait, herbicide tolerance trait, nitrogen use efficiency trait, water use efficiency trait, nutritional quality trait, DNA binding trait, selectable marker trait, small RNA trait, or any combination thereof. In some aspects the transgenic plant produces a commodity product. Exemplary commodity products include protein concentrate, protein isolate, grain, meal, flour, oil, or fiber.

[0014] Disclosed herein is a method for enhancing the expression of a regulatory molecule, the method comprising the steps of: obtaining a cis-acting regulatory element comprising at least 90%, 91%, 92%, 93%, 94%, 95%, 96%, 97%, 98%, 99%, or 100% identity to SEQ ID NO:9, SEQ ID NOs:25-583, SEQ ID NOs:585-2268; engineering the cis-acting regulatory element comprising at least 90%, 91%, 92%, 93%, 94%, 95%, 96%, 97%, 98%, 99%, or 100% identity to SEQ ID NO:9, SEQ ID NOs:25-583, SEQ ID NOs:585-2268 within a regulatory molecule to produce a chimeric regulatory molecule; linking the chimeric regulatory molecule to a heterologous coding sequence to produce a gene expression cassette; transforming the gene expression cassette within a plant to obtain a transgenic plant, wherein the transgenic plant expresses the heterologous coding sequence. In some aspects the regulatory molecule is a promoter. In other aspects transformation method is selected from the group consisting of an Agrobacterium-mediated transformation method, a biolistics transformation method, a silicon carbide transformation method, a protoplast transformation method, and a liposome transformation method. In further aspects the regulatory molecule is expressed within a cell of the transgenic plant. In additional aspects the polynucleotide sequence of interest is stably integrated into the genome of the plant cell. In subsequent aspects the transgenic plant is a monocotyledonous plant or a dicotyledonous plant. In additional aspects the cis-acting regulatory element is provided as two or more copies.

[0015] Disclosed herein is an isolated nucleic acid molecule capable of modulating transcription of a gene of interest, wherein the nucleic acid molecule comprises at least 90%, 91%, 92%, 93%, 94%, 95%, 96%, 97%, 98%, 99%, or 100% identity to SEQ ID NO:9, SEQ ID NOs:25-583, SEQ ID NOs:585-2268. In some aspects the modulation results in enhanced expression of the gene of interest. In other aspects the modulation results in reduced expression of the gene of interest. In additional aspects the modulation of expression of the gene of interest occurs in a eukaryotic cell. In other aspects the gene of interest is a trait selected from the group consisting of an insecticidal resistance trait, herbicide tolerance trait, nitrogen use efficiency trait, water use efficiency trait, nutritional quality trait, DNA binding trait, selectable marker trait, small RNA trait, or any combination thereof. Disclosed herein is a chimeric regulatory molecule produced by a method comprising the steps of: introducing at least one cis-acting regulatory element within a promoter regulatory element to produce a chimeric regulatory molecule, wherein the cis-acting regulatory element comprises a nucleic acid molecule that shares at least 90%, 91%, 92%, 93%, 94%, 95%, 96%, 97%, 98%, 99%, or 100% identity to SEQ ID NO:9, SEQ ID NOs:25-583, SEQ ID NOs:585-2268. In other aspects the chimeric regulatory molecule comprises a heterologous coding sequence operably linked to the chimeric regulatory molecule. In other aspects the heterologous coding sequence is a trait selected from the group consisting of an insecticidal resistance trait, herbicide tolerance trait, nitrogen use efficiency trait, water use efficiency trait, nutritional quality trait, DNA binding trait, selectable marker trait, small RNA trait, or any combination thereof. In further aspects the chimeric regulatory molecule is introduced into a gene expression cassette. In other aspects the method includes the steps of: transforming a plant cell with the gene expression cassette; and, obtaining a transgenic plant cell comprising the gene expression cassette. In additional aspect the method includes the steps of: screening the transgenic plant for expression of the heterologous coding sequence; detecting the levels of the expressed heterologous coding sequence to determine an expression profile of the chimeric regulatory molecule; and, comparing the expression profile of the chimeric regulatory molecule to an expression profile of a transgenic plant that expresses a heterologous coding sequence driven by the promoter regulatory element, wherein the promoter regulatory element does not contain the cis-acting element. In additional aspects the nucleic acid sequence comprising at least 90%, 91%, 92%, 93%, 94%, 95%, 96%, 97%, 98%, 99%, or 100% identity to SEQ ID NO:9, SEQ ID NOs:25-583, SEQ ID NOs:585-2268 is provided as two or more copies.

[0016] The foregoing and other features will become more apparent from the following embodiments as provided in the Claims and Detailed Description, which proceeds with reference to the accompanying Figures and Sequence Listing.

### FIGURES

[0017] FIG. 1 provides a graph showing the effect of a select set of cis-acting regulatory elements obtained from a database on expression levels driven by the CaMV 35S minimum promoter. EE1906 is background control, i.e., CaMV 35S minimum promoter with no test cassette. Error bars are shown as SEM.

[0018] FIG. 2 provides a table showing a sequence alignment of SEQ ID NO:23-32.

[0019] FIG. 3 provides a table showing a sequence alignment of SEQ ID NO:33-36.

[0020] FIG. 4 provides a graph showing the effect of MMV as-1 elements on expression levels driven by the CaMV 35S minimum promoter. EE1906 is background control, i.e., CaMV 35S minimum promoter with no test cassette. Error bars are shown as SEM.

[0021] FIG. 5 provides a graph showing the effect of FMV as-1 elements on expression levels driven by the CaMV 35S minimum promoter. EE1906 is background control, i.e., CaMV 35S minimum promoter with no test cassette. Error bars are shown as SEM.

[0022] FIG. 6 provides a graph showing the effect of MMV as-1 elements on expression levels driven by the CaMV 35S minimum promoter. EE1906 is background control, i.e., CaMV 35S minimum promoter with no test cassette. Error bars are shown as SEM.

[0023] FIG. 7 and FIG. 7.1 provides a table showing a sequence alignment of SEQ ID NO:508-515.

[0024] FIG. 8 provides a graph showing the effect of MMV as-1 elements on expression levels driven by the CaMV 35S minimum promoter. EE1906 is background control, i.e., CaMV 35S minimum promoter with no test cassette. Error bars are shown as SEM.

[0025] FIG. 9 provides a table showing a sequence alignment of SEQ ID NO:516-525.

[0026] FIG. 10 provides a graph showing the effect of PSGS3AF1 elements on expression levels driven by the CaMV 35S minimum promoter. EE1906 is background control, i.e., CaMV 35S minimum promoter with no test cassette. Error bars are shown as SEM.

[0027] FIG. 11 provides a table showing a sequence alignment of SEQ ID NO:526-531.

[0028] FIG. 12 provides a graph showing the effect of cis-genic regulatory elements on expression levels driven by the Zea mays GOS2 minimum promoter. EE1619 is background control, i.e., CaMV 35S minimum promoter with no test cassette. Error bars are shown as SEM.

[0029] FIG. 13 and FIG. 13.1 provides a table showing a sequence alignment of SEQ ID NO:532-550 and SEQ ID NO:25, 28, 30 and 33.

[0030] FIG. 14 provides a graph showing the effect of cis-genic regulatory elements on expression levels driven by the Zea mays GOS2 promoter. EE1619 is background control, i.e., CaMV 35S minimum promoter with no test cassette. Error bars are shown as SEM.

[0031] FIG. 15, FIG. 15.1, and FIG. 15.2 provides a table showing a sequence alignment of SEQ ID NO:551-583 and SEQ ID NO:2, 3, 4, 5, 8, 9.

[0032] FIG. 16 provides a graph showing the effect of MMV-EME 1 and GM-PSGS3AF1-V3 elements on expression levels driven by the Zea mays GOS2 promoter. EE1619 is the background control, i.e., CaMV 35S minimum promoter with no test cassette. Error bars are shown as SEM.

[0033] FIG. 17 provides a table showing a sequence alignment of SEQ ID NO:516 and 529.

[0034] FIG. 18 provides a graph showing the effect of MMV as-1 elements obtained from maize on expression levels driven by the CaMV 35S minimum promoter. EE3549 is the background control, i.e., CaMV 35S minimum promoter (Yang et al., 2000) with no test cassette. Error bars are shown as SEM.

[0035] FIG. 19 and FIG. 19.1 provides a table showing a sequence alignment of SEQ ID NO:585-601.

[0036] FIG. 20 provides a graph showing the effect of GVBAVAS1 elements on expression levels driven by the CaMV 35S minimum promoter. EE3549 is a background control, i.e., CaMV 35S minimum promoter (Yang et al., 2000) with no test cassette. Error bars are shown as SEM.

[0037] FIG. 21, FIG. 21.1 and FIG. 21.2 provides a table showing a sequence alignment of SEQ ID NO:602-634.

### SEQUENCE LISTING

[0038] The nucleic acid sequences listed in the accompanying sequence listing are shown using standard letter abbreviations for nucleotide bases, as defined in 37 C.F.R. § 1.822. Only one strand of each nucleic acid sequence is shown, but the complementary strand and reverse complementary strand are understood as included by any reference to the displayed strand. As the complement and reverse complement of a primary nucleic acid sequence are necessarily disclosed by the primary sequence, the complementary sequence and reverse complementary sequence of a nucleic acid sequence are included by any reference to the nucleic acid sequence, unless it is explicitly stated to be otherwise (or it is clear to be otherwise from the context in which the sequence appears).

### DETAILED DESCRIPTION

[0039] Development of transgenic plant products is becoming increasingly complex. Commercially viable transgenic plants now require the stacking of multiple transgenes into a single locus. Obtaining optimal levels of transgene/heterologous coding sequence expression is necessary for the production of a single polygenic trait. Unfortunately, gene expression constructs driven by a weakly expressing promoter may not be expressed at an optimal expression level, thereby resulting in less efficacious transgenic products in the field. Accordingly there remains a need to increase expression of a transgene/heterologous coding sequence within a plant to develop transgenic crops that robustly express the transgene/heterologous coding sequence.

[0040] Provided are methods and compositions for overcoming such problems through the use of cis-acting regulatory elements to express transgenes in planta.

### Definitions

[0041] Unless defined otherwise, all technical and scientific terms used herein have the same meaning as commonly understood by one of ordinary skill in the art to which this disclosure relates. In case of conflict, the present application including the definitions will control. Unless otherwise required by context, singular terms shall include pluralities and plural terms shall include the singular. All publications, patents and other references mentioned herein are incorporated by reference in their entireties for all purposes as if each individual publication or patent application were specifically and individually indicated to be incorporated by reference, unless only specific sections of patents or patent publications are indicated to be incorporated by reference.

[0042] In order to further clarify this disclosure, the following terms, abbreviations and definitions are provided.

[0043] As used herein, the terms “comprises”, “comprising”, “includes”, “including”, “has”, “having”, “contains”,” or “containing”, or any other variation thereof, are intended to be non-exclusive or open-ended. For example, a composition, a mixture, a process, a method, an article, or an apparatus that comprises a list of elements is not necessarily limited to only those elements but may include other elements not expressly listed or inherent to such composition, mixture, process, method, article, or apparatus. Further, unless expressly stated to the contrary, “or” refers to an inclusive or and not to an exclusive or. For example, a condition A or B is satisfied by any one of the following: A is true (or present) and B is false (or not present), A is false (or not present) and B is true (or present), and both A and B are true (or present).

[0044] Also, the indefinite articles “a” and “an” preceding an element or component of an embodiment of the disclosure are intended to be nonrestrictive regarding the number of instances, i.e., occurrences of the element or component. Therefore “a” or “an” should be read to include one or at least one, and the singular word form of the element or component also includes the plural unless the number is obviously meant to be singular.

[0045] The term “invention” or “present invention” as used herein is a non-limiting term and is not intended to refer to any single embodiment of the particular invention but encompasses all possible embodiments as disclosed in the application.

[0046] “The term “isolated”, as used herein means having been removed from its natural environment, or removed from other compounds present when the compound is first formed. The term “isolated” embraces materials isolated from natural sources as well as materials (e.g., nucleic acids and proteins) recovered after preparation by recombinant expression in a host cell, or chemically-synthesized compounds such as nucleic acid molecules, proteins, and peptides.

[0047] The term “purified”, as used herein relates to the isolation of a molecule or compound in a form that is substantially free of contaminants normally associated with the molecule or compound in a native or natural environment, or substantially enriched in concentration relative to other compounds present when the compound is first formed, and means having been increased in purity as a result of being separated from other components of the original composition. The term “purified nucleic acid” is used herein to describe a nucleic acid sequence which has been separated, produced apart from, or purified away from other biological compounds including, but not limited to polypeptides, lipids and carbohydrates, while effecting a chemical or functional change in the component (e.g., a nucleic acid may be purified from a chromosome by removing protein contaminants and breaking chemical bonds connecting the nucleic acid to the remaining DNA in the chromosome).

[0048] The term “synthetic”, as used herein refers to a polynucleotide (i.e., a DNA or RNA) molecule that was created via chemical synthesis as an in vitro process. For example, a synthetic DNA may be created during a reaction within an Eppendorf™ tube, such that the synthetic DNA is enzymatically produced from a native strand of DNA or RNA. Other laboratory methods may be utilized to synthesize a polynucleotide sequence. Oligonucleotides may be chemically synthesized on an oligo synthesizer via solid-phase synthesis using phosphoramidites. The synthesized oligonucleotides may be annealed to one another as a complex, thereby producing a “synthetic” polynucleotide. Other methods for chemically synthesizing a polynucleotide are known in the art, and can be readily implemented for use in the present disclosure.

[0049] The term “about” as used herein means greater or lesser than the value or range of values stated by 10 percent, but is not intended to designate any value or range of values to only this broader definition. Each value or range of values preceded by the term “about” is also intended to encompass the embodiment of the stated absolute value or range of values.

[0050] For the purposes of the present disclosure, a “gene,” includes a DNA region encoding a gene product (see infra), as well as all DNA regions which regulate the production of the gene product, whether or not such regulatory sequences are adjacent to coding and/or transcribed sequences. Accordingly, a gene includes, but is not necessarily limited to, promoter sequences, terminators, translational regulatory sequences such as ribosome binding sites and internal ribosome entry sites, enhancers, silencers, insulators, boundary elements, replication origins, matrix attachment sites, introns and locus control regions.

[0051] As used herein the terms “native” or “natural” define a condition found in nature. A “native DNA sequence” is a DNA sequence present in nature that was produced by natural means or traditional breeding techniques but not generated by genetic engineering (e.g., using molecular biology/transformation techniques).

[0052] As used herein a “transgene” is defined to be a nucleic acid sequence that encodes a gene product, including for example, but not limited to, an mRNA. In one embodiment the transgene/heterologous coding sequence is an exogenous nucleic acid, where the transgene/heterologous coding sequence has been introduced into a host cell by genetic engineering (or the progeny thereof) where the transgene/heterologous coding sequence is not normally found. In one example, a transgene/heterologous coding sequence encodes an industrially or pharmaceutically useful compound, or a gene encoding a desirable agricultural trait (e.g., an herbicide-resistance gene). In yet another example, a transgene/heterologous coding sequence is an antisense nucleic acid sequence, wherein expression of the antisense nucleic acid sequence inhibits expression of a target nucleic acid sequence. In one embodiment the transgene/heterologous coding sequence is an endogenous nucleic acid, wherein additional genomic copies of the endogenous nucleic acid are desired, or a nucleic acid that is in the antisense orientation with respect to the sequence of a target nucleic acid in a host organism.

[0053] As used herein the term “non-GmPSID2 transgene” or “non-GmPSID2 gene” is any transgene/heterologous coding sequence that has less than 80% sequence identity with the GmPSID2 gene coding sequence.

[0054] As used herein, “heterologous DNA coding sequence” means any coding sequence other than the one that naturally encodes the GmPSID2 gene, or any homolog of the expressed GmPSID2 protein. The term “heterologous” is used in the context of this invention for any combination of nucleic acid sequences that is not normally found intimately associated in nature.

[0055] A “gene product” as defined herein is any product produced by the gene. For example the gene product can be the direct transcriptional product of a gene (e.g., mRNA, tRNA, IRNA, antisense RNA, interfering RNA, ribozyme, structural RNA or any other type of RNA) or a protein produced by translation of a mRNA. Gene products also include RNAs which are modified, by processes such as capping, polyadenylation, methylation, and editing, and proteins modified by, for example, methylation, acetylation, phosphorylation, ubiquitination, ADP-ribosylation, myristoylation, and glycosylation. Gene expression can be influenced by external signals, for example, exposure of a cell, tissue, or organism to an agent that increases or decreases gene expression. Expression of a gene can also be regulated anywhere in the pathway from DNA to RNA to protein. Regulation of gene expression occurs, for example, through controls acting on transcription, translation, RNA transport and processing, degradation of intermediary molecules such as mRNA, or through activation, inactivation, compartmentalization, or degradation of specific protein molecules after they have been made, or by combinations thereof. Gene expression can be measured at the RNA level or the protein level by any method known in the art, including, without limitation, Northern blot, RT-PCR, Western blot, or in vitro, in situ, or in vivo protein activity assay(s).

[0056] As used herein the term “gene expression” relates to the process by which the coded information of a nucleic acid transcriptional unit (including, e.g., genomic DNA) is converted into an operational, non-operational, or structural part of a cell, often including the synthesis of a protein. Gene expression can be influenced by external signals; for example, exposure of a cell, tissue, or organism to an agent that increases or decreases gene expression. Expression of a gene can also be regulated anywhere in the pathway from DNA to RNA to protein. Regulation of gene expression occurs, for example, through controls acting on transcription, translation, RNA transport and processing, degradation of intermediary molecules such as mRNA, or through activation, inactivation, compartmentalization, or degradation of specific protein molecules after they have been made, or by combinations thereof. Gene expression can be measured at the RNA level or the protein level by any method known in the art, including, without limitation, Northern blot, RT-PCR, Western blot, or in vitro, in situ, or in vivo protein activity assay(s).

[0057] As used herein, “homology-based gene silencing” (HBGS) is a generic term that includes both transcriptional gene silencing and post-transcriptional gene silencing. Silencing of a target locus by an unlinked silencing locus can result from transcription inhibition (transcriptional gene silencing; TGS) or mRNA degradation (post-transcriptional gene silencing; PTGS), owing to the production of double-stranded RNA (dsRNA) corresponding to promoter or transcribed sequences, respectively. The involvement of distinct cellular components in each process suggests that dsRNA-induced TGS and PTGS likely result from the diversification of an ancient common mechanism. However, a strict comparison of TGS and PTGS has been difficult to achieve because it generally relies on the analysis of distinct silencing loci. In some instances, a single transgene locus can triggers both TGS and PTGS, owing to the production of dsRNA corresponding to promoter and transcribed sequences of different target genes. Mourrain et al. (2007) Planta 225:365-79. It is likely that siRNAs are the actual molecules that trigger TGS and PTGS on homologous sequences: the siRNAs would in this model trigger silencing and methylation of homologous sequences in cis and in trans through the spreading of methylation of transgene sequences into the endogenous promoter.

[0058] As used herein, the term “nucleic acid molecule” (or “nucleic acid” or “polynucleotide”) may refer to a polymeric form of nucleotides, which may include both sense and anti-sense strands of RNA, cDNA, genomic DNA, and synthetic forms and mixed polymers of the above. A nucleotide may refer to a ribonucleotide, deoxyribonucleotide, or a modified form of either type of nucleotide. A “nucleic acid molecule” as used herein is synonymous with “nucleic acid” and “polynucleotide”. A nucleic acid molecule is usually at least 10 bases in length, unless otherwise specified. The term may refer to a molecule of RNA or DNA of indeterminate length. The term includes single- and double-stranded forms of DNA. A nucleic acid molecule may include either or both naturally-occurring and modified nucleotides linked together by naturally occurring and/or non-naturally occurring nucleotide linkages.

[0059] Nucleic acid molecules may be modified chemically or biochemically, or may contain non-natural or derivatized nucleotide bases, as will be readily appreciated by those of skill in the art. Such modifications include, for example, labels, methylation, substitution of one or more of the naturally occurring nucleotides with an analog, internucleotide modifications (e.g., uncharged linkages: for example, methyl phosphonates, phosphotriesters, phosphoramidites, carbamates, etc.; charged linkages: for example, phosphorothioates, phosphorodithioates, etc.; pendent moieties: for example, peptides; intercalators: for example, acridine, psoralen, etc.; chelators; alkylators; and modified linkages: for example, alpha anomeric nucleic acids, etc.). The term “nucleic acid molecule” also includes any topological conformation, including single-stranded, double-stranded, partially duplexed, triplexed, hairpinned, circular, and padlocked conformations.

[0060] Transcription proceeds in a 5′ to 3′ manner along a DNA strand. This means that RNA is made by the sequential addition of ribonucleotide-5′-triphosphates to the 3′ terminus of the growing chain (with a requisite elimination of the pyrophosphate). In either a linear or circular nucleic acid molecule, discrete elements (e.g., particular nucleotide sequences) may be referred to as being “upstream” or “5′” relative to a further element if they are bonded or would be bonded to the same nucleic acid in the 5′ direction from that element. Similarly, discrete elements may be “downstream” or “3” relative to a further element if they are or would be bonded to the same nucleic acid in the 3′ direction from that element.

[0061] A base “position”, as used herein, refers to the location of a given base or nucleotide residue within a designated nucleic acid. The designated nucleic acid may be defined by alignment (see below) with a reference nucleic acid.

[0062] Hybridization relates to the binding of two polynucleotide strands via Hydrogen bonds. Oligonucleotides and their analogs hybridize by hydrogen bonding, which includes Watson-Crick, Hoogsteen or reversed Hoogsteen hydrogen bonding, between complementary bases. Generally, nucleic acid molecules consist of nitrogenous bases that are either pyrimidines (cytosine (C), uracil (U), and thymine (T)) or purines (adenine (A) and guanine (G)). These nitrogenous bases form hydrogen bonds between a pyrimidine and a purine, and the bonding of the pyrimidine to the purine is referred to as “base pairing.” More specifically, A will hydrogen bond to Tor U, and G will bond to C. “Complementary” refers to the base pairing that occurs between two distinct nucleic acid sequences or two distinct regions of the same nucleic acid sequence.

[0063] “Specifically hybridizable” and “specifically complementary” are terms that indicate a sufficient degree of complementarity such that stable and specific binding occurs between the oligonucleotide and the DNA or RNA target. The oligonucleotide need not be 100% complementary to its target sequence to be specifically hybridizable. An oligonucleotide is specifically hybridizable when binding of the oligonucleotide to the target DNA or RNA molecule interferes with the normal function of the target DNA or RNA, and there is sufficient degree of complementarity to avoid non-specific binding of the oligonucleotide to non-target sequences under conditions where specific binding is desired, for example under physiological conditions in the case of in vivo assays or systems. Such binding is referred to as specific hybridization.

[0064] Hybridization conditions resulting in particular degrees of stringency will vary depending upon the nature of the chosen hybridization method and the composition and length of the hybridizing nucleic acid sequences. Generally, the temperature of hybridization and the ionic strength (especially the Na+ and/or Mg2+ concentration) of the hybridization buffer will contribute to the stringency of hybridization, though wash times also influence stringency. Calculations regarding hybridization conditions required for attaining particular degrees of stringency are discussed in Sambrook et al. (ed.), μMolecular Cloning: A Laboratory Manual, 2nd ed., vol. 1-3, Cold Spring Harbor Laboratory Press, Cold Spring Harbor, New York, 1989, chs. 9 and 11.

[0065] As used herein, “stringent conditions” encompass conditions under which hybridization will only occur if there is less than 50% mismatch between the hybridization molecule and the DNA target. “Stringent conditions” include further particular levels of stringency. Thus, as used herein, “moderate stringency” conditions are those under which molecules with more than 50% sequence mismatch will not hybridize; conditions of “high stringency” are those under which sequences with more than 20% mismatch will not hybridize; and conditions of “very high stringency” are those under which sequences with more than 10% mismatch will not hybridize.

[0066] In particular embodiments, stringent conditions can include hybridization at 65° C., followed by washes at 65° C. with 0.1×SSC/0.1% SDS for 40 minutes.

[0067] The following are representative, non-limiting hybridization conditions:
[0068] Very High Stringency: Hybridization in 5×SSC buffer at 65° C. for 16 hours; wash twice in 2×SSC buffer at room temperature for 15 minutes each; and wash twice in 0.5×SSC buffer at 65° C. for 20 minutes each.
[0069] High Stringency: Hybridization in 5×-6×SSC buffer at 65-70° C. for 16-20 hours; wash twice in 2×SSC buffer at room temperature for 5-20 minutes each; and wash twice in 1×SSC buffer at 55-70° C. for 30 minutes each.
[0070] Moderate Stringency: Hybridization in 6×SSC buffer at room temperature to 55° C. for 16-20 hours; wash at least twice in 2×-3×SSC buffer at room temperature to 55° C. for 20-30 minutes each.

[0071] In particular embodiments, specifically hybridizable nucleic acid molecules can remain bound under very high stringency hybridization conditions. In these and further embodiments, specifically hybridizable nucleic acid molecules can remain bound under high stringency hybridization conditions. In these and further embodiments, specifically hybridizable nucleic acid molecules can remain bound under moderate stringency hybridization conditions.

[0072] As used herein, the term “oligonucleotide” refers to a short nucleic acid polymer. Oligonucleotides may be formed by cleavage of longer nucleic acid segments, or by polymerizing individual nucleotide precursors. Automated synthesizers allow the synthesis of oligonucleotides up to several hundred base pairs in length. Because oligonucleotides may bind to a complementary nucleotide sequence, they may be used as probes for detecting DNA or RNA. Oligonucleotides composed of DNA (oligodeoxyribonucleotides) may be used in PCR, a technique for the amplification of small DNA sequences. In PCR, the oligonucleotide is typically referred to as a “primer”, which allows a DNA polymerase to extend the oligonucleotide and replicate the complementary strand.

[0073] The terms “percent sequence identity” or “percent identity” or “identity” are used interchangeably to refer to a sequence comparison based on identical matches between correspondingly identical positions in the sequences being compared between two or more amino acid or nucleotide sequences. The percent identity refers to the extent to which two optimally aligned polynucleotide or peptide sequences are invariant throughout a window of alignment of components, e.g., nucleotides or amino acids. Hybridization experiments and mathematical algorithms known in the art may be used to determine percent identity. Many mathematical algorithms exist as sequence alignment computer programs known in the art that calculate percent identity. These programs may be categorized as either global sequence alignment programs or local sequence alignment programs.

[0074] Global sequence alignment programs calculate the percent identity of two sequences by comparing alignments end-to-end in order to find exact matches, dividing the number of exact matches by the length of the shorter sequences, and then multiplying by 100. Basically, the percentage of identical nucleotides in a linear polynucleotide sequence of a reference (“query) polynucleotide molecule as compared to a test (“subject”) polynucleotide molecule when the two sequences are optimally aligned (with appropriate nucleotide insertions, deletions, or gaps).

[0075] Local sequence alignment programs are similar in their calculation, but only compare aligned fragments of the sequences rather than utilizing an end-to-end analysis. Local sequence alignment programs such as BLAST can be used to compare specific regions of two sequences. A BLAST comparison of two sequences results in an E-value, or expectation value, that represents the number of different alignments with scores equivalent to or better than the raw alignment score, S, that are expected to occur in a database search by chance. The lower the E value, the more significant the match. Because database size is an element in E-value calculations, E-values obtained by BLASTing against public databases, such as GENBANK, have generally increased over time for any given query/entry match. In setting criteria for confidence of polypeptide function prediction, a “high” BLAST match is considered herein as having an E-value for the top BLAST hit of less than 1E-30; a medium BLASTX E-value is 1E-30 to 1E-8; and a low BLASTX E-value is greater than 1E-8. The protein function assignment in the present invention is determined using combinations of E-values, percent identity, query coverage and hit coverage. Query coverage refers to the percent of the query sequence that is represented in the BLAST alignment. Hit coverage refers to the percent of the database entry that is represented in the BLAST alignment. In one embodiment of the invention, function of a query polypeptide is inferred from function of a protein homolog where either (1) hit_p<1e-30 or % identity>35% AND query_coverage>50% AND hit_coverage>50%, or (2) hit_p<1e-8 AND query_coverage>70% AND hit_coverage>70%. The following abbreviations are produced during a BLAST analysis of a sequence.

| | |
|---|---|
| SEQ_NUM | provides the SEQ ID NO for the listed recombinant |
| | polynucleotide sequences. |
| CONTIG_ID | provides an arbitrary sequence name taken from the name of |
| | the clone from which the cDNA sequence was obtained. |
| PROTEIN_NUM | provides the SEQ ID NO for the recombinant polypeptide |
| | sequence |
| NCBI_GI | provides the GenBank ID number for the top BLAST hit for |
| | the sequence. The top BLAST hit is indicated by the |
| | National Center for Biotechnology Information GenBank |
| | Identifier number. |
| NCBI_GI_DESCRIPTION | refers to the description of the GenBank top BLAST hit for |
| | the sequence. |
| E_VALUE | provides the expectation value for the top BLAST match. |
| MATCH_LENGTH | provides the length of the sequence which is aligned in the |
| | top BLAST match |
| TOP_HIT_PCT_IDENT | refers to the percentage of identically matched nucleotides |
| | (or residues) that exist along the length of that portion of |
| | the sequences which is aligned in the top BLAST match. |
| CAT_TYPE | indicates the classification scheme used to classify the |
| | sequence. GO_BP = Gene Ontology Consortium -biological |
| | process; GO_CC = Gene Ontology Consortium - cellular |
| | component; GO_MF = Gene Ontology Consortium - molecular |
| | function; KEGG = KEGG functional hierarchy (KEGG = Kyoto |
| | Encyclopedia of Genes and Genomes); EC = Enzyme |
| | Classification from ENZYME data bank release 25.0; POI = |
| | Pathways of Interest. |
| CAT_DESC | provides the classification scheme subcategory to which the |
| | query sequence was assigned. |
| PRODUCT_CAT_DESC | provides the FunCAT annotation category to which the |
| | query sequence was assigned. |
| PRODUCT_HIT_DESC | provides the description of the BLAST hit which resulted in |
| | assignment of the sequence to the function category |
| | provided in the cat desc column. |
| HIT_E | provides the E value for the BLAST bit in the hit desc |
| | column. |
| PCT_IDENT | refers to the percentage of identically matched nucleotides |
| | (or residues) that exist along the length of that portion |
| | of the sequences which is aligned in the BLAST match |
| | provided in hit_desc. |
| QRY_RANGE | lists the range of the query sequence aligned with the hit. |
| HIT_RANGE | lists the range of the hit sequence aligned with the query. |
| QRY_CVRG | provides the percent of query sequence length that matches |
| | to the bit (NCBI) sequence in the BLAST match (% qry cvrg = |
| | (match length/query total length) × 100). |
| HIT_CVRG | provides the percent of hit sequence length that matches to |
| | the query sequence in the match generated using BLAST (% |
| | hit cvrg = (match length/hit total length) × 100) |

[0076] Methods for aligning sequences for comparison are well-known in the art. Various programs and alignment algorithms are described. In an embodiment, the subject disclosure relates to calculating percent identity between two polynucleotides or amino acid sequences using an AlignX alignment program of the Vector NTI suite (Invitrogen, Carlsbad, CA). The AlignX alignment program is a global sequence alignment program for polynucleotides or proteins. In an embodiment, the subject disclosure relates to calculating percent identity between two polynucleotides or amino acid sequences using the MegAlign program of the LASERGENE bioinformatics computing suite (MegAlign™ (©1993-2016). DNASTAR. Madison, WI). The MegAlign program is global sequence alignment program for polynucleotides or proteins. In an embodiment, the subject disclosure relates to calculating percent identity between two polynucleotides or amino acid sequences using the Clustal suite of alignment programs, including, but not limited to, ClustalW and ClustalV (Higgins and Sharp (1988) Gene. December 15; 73(1):237-44; Higgins and Sharp (1989) CABIOS 5:151-3; Higgins et al. (1992) Comput. Appl. Biosci. 8:189-91). In an embodiment, the subject disclosure relates to calculating percent identity between two polynucleotides or amino acid sequences using the GCG suite of programs (Wisconsin Package Version 9.0, Genetics Computer Group (GCG), Madison, WI). In an embodiment, the subject disclosure relates to calculating percent identity between two polynucleotides or amino acid sequences using the BLAST suite of alignment programs, for example, but not limited to, BLASTP, BLASTN, BLASTX, etc. (Altschul et al. (1990) J. Mol. Biol. 215:403-10). In an embodiment, the subject disclosure relates to calculating percent identity between two polynucleotides or amino acid sequences using the FASTA suite of alignment programs, including, but not limited to, FASTA, TFASTX, TFASTY, SSEARCH, LALIGN etc. (Pearson (1994) Comput. Methods Genome Res. [Proc. Int. Symp.], Meeting Date 1992 (Suhai and Sandor, Eds.), Plenum: New York, NY, pp. 111-20). In an embodiment, the subject disclosure relates to calculating percent identity between two polynucleotides or amino acid sequences using the T-Coffee alignment program (Notredame, et. al. (2000) J. Mol. Biol. 302, 205-17). In an embodiment, the subject disclosure relates to calculating percent identity between two polynucleotides or amino acid sequences using the DIALIGN suite of alignment programs, including, but not limited to DIALIGN, CHAOS, DIALIGN-TX, DIALIGN-T etc. (A1Ait, et. al. (2013) DIALIGN at GOBICS Nuc. Acids Research 41, W3-W7). In an embodiment, the subject disclosure relates to calculating percent identity between two polynucleotides or amino acid sequences using the MUSCLE suite of alignment programs (Edgar (2004) Nucleic Acids Res. 32(5):1792-1797). In an embodiment, the subject disclosure relates to calculating percent identity between two polynucleotides or amino acid sequences using the MAFFT alignment program (Katoh, et. al. (2002) Nucleic Acids Research 30(14):3059-3066). In an embodiment, the subject disclosure relates to calculating percent identity between two polynucleotides or amino acid sequences using the Genoogle program (Albrecht, Felipe. arXiv130702987v1 [cs.DC] 10 Jul. 2015). In an embodiment, the subject disclosure relates to calculating percent identity between two polynucleotides or amino acid sequences using the HMMER suite of programs (Eddy. (1998) Bioinformatics, 14:755-63). In an embodiment, the subject disclosure relates to calculating percent identity between two polynucleotides or amino acid sequences using the PLAST suite of alignment programs, including, but not limited to, TPLASTN, PLASTP, KLAST, and PLASTX (Nguyen & Lavenier. (2009) BMC Bioinformatics, 10:329). In an embodiment, the subject disclosure relates to calculating percent identity between two polynucleotides or amino acid sequences using the USEARCH alignment program (Edgar (2010) Bioinformatics 26(19), 2460-61). In an embodiment, the subject disclosure relates to calculating percent identity between two polynucleotides or amino acid sequences using the SAM suite of alignment programs (Hughey & Krogh (January 1995) Technical Report UCSC0CRL-95-7, University of California, Santa Cruz). In an embodiment, the subject disclosure relates to calculating percent identity between two polynucleotides or amino acid sequences using the IDF Searcher (O'Kane, K. C., The Effect of Inverse Document Frequency Weights on Indexed Sequence Retrieval, Online Journal of Bioinformatics, Volume 6 (2) 162-173, 2005). In an embodiment, the subject disclosure relates to calculating percent identity between two polynucleotides or amino acid sequences using the Parasail alignment program. (Daily, Jeff. Parasail: SIMD C library for global, semi-global, and local pairwise sequence alignments. BMC Bioinformatics. 17:18. Feb. 10, 2016). In an embodiment, the subject disclosure relates to calculating percent identity between two polynucleotides or amino acid sequences using the ScalaBLAST alignment program (Oehmen C, Nieplocha J. “ScalaBLAST: A scalable implementation of BLAST for high-performance data-intensive bioinformatics analysis.” IEEE Transactions on Parallel & Distributed Systems 17 (8): 740-749 August 2006). In an embodiment, the subject disclosure relates to calculating percent identity between two polynucleotides or amino acid sequences using the SWIPE alignment program (Rognes, T. Faster Smilth-Waterman database searches with inter-sequence SIMD parallelization. BMC Bioinformatics. 12, 221 (2011)). In an embodiment, the subject disclosure relates to calculating percent identity between two polynucleotides or amino acid sequences using the ACANA alignment program (Weichun Huang, David M. Umbach, and Leping Li, Accurate anchoring alignment of divergent sequences. Bioinformatics 22:29-34, Jan. 1 2006). In an embodiment, the subject disclosure relates to calculating percent identity between two polynucleotides or amino acid sequences using the DOTLET alignment program (Junier, T. & Pagni, M. DOTLET: diagonal plots in a web browser. Bioinformatics 16 (2): 178-9 February 2000). In an embodiment, the subject disclosure relates to calculating percent identity between two polynucleotides or amino acid sequences using the G-PAS alignment program (Frohmberg, W., et al. G-PAS 2.0—an improved version of protein alignment tool with an efficient backtracking routine on multiple GPUs. Bulletin of the Polish Academy of Sciences Technical Sciences, Vol. 60, 491 November 2012). In an embodiment, the subject disclosure relates to calculating percent identity between two polynucleotides or amino acid sequences using the GapMis alignment program (Flouri, T. et. al., Gap Mis: A tool for pairwise sequence alignment with a single gap. Recent Pat DNA Gene Seq. 7(2):84-95 August 2013). In an embodiment, the subject disclosure relates to calculating percent identity between two polynucleotides or amino acid sequences using the EMBOSS suite of alignment programs, including, but not limited to: Matcher, Needle, Stretcher, Water, Wordmatch, etc. (Rice, P., Longden, I. & Bleasby, A. EMBOSS: The European Molecular Biology Open Software Suite. Trends in Genetics 16(6) 276-77 (2000)). In an embodiment, the subject disclosure relates to calculating percent identity between two polynucleotides or amino acid sequences using the Ngila alignment program (Cartwright, R. Ngila: global pairwise alignments with logarithmic and affine gap costs. Bioinformatics. 23(11): 1427-28. Jun. 1, 2007). In an embodiment, the subject disclosure relates to calculating percent identity between two polynucleotides or amino acid sequences using the probA, also known as propA, alignment program (Mückstein, U., Hofacker, IL, & Stadler, PF. Stochastic pairwise alignments. Bioinformatics 18 Suppl. 2:S153-60. 2002). In an embodiment, the subject disclosure relates to calculating percent identity between two polynucleotides or amino acid sequences using the SEQALN suite of alignment programs (Hardy, P. & Waterman, M. The Sequence Alignment Software Library at USC. 1997). In an embodiment, the subject disclosure relates to calculating percent identity between two polynucleotides or amino acid sequences using the SIM suite of alignment programs, including, but not limited to, GAP, NAP, LAP, etc. (Huang, X & Miller, W. A Time-Efficient, Linear-Space Local Similarity Algorithm. Advances in Applied Mathematics, vol. 12 (1991) 337-57). In an embodiment, the subject disclosure relates to calculating percent identity between two polynucleotides or amino acid sequences using the UGENE alignment program (Okonechnikov, K., Golosova, O. & Fursov, M. Unipro UGENE: a unified bioinformatics toolkit. Bioinformatics. 2012 28:1166-67). In an embodiment, the subject disclosure relates to calculating percent identity between two polynucleotides or amino acid sequences using the BAli-Phy alignment program (Suchard, M A & Redelings, B D. BAli-Phy: simultaneous Bayesian inference of alignment and phylogeny. Bioinformatics. 22:2047-48. 2006). In an embodiment, the subject disclosure relates to calculating percent identity between two polynucleotides or amino acid sequences using the Base-By-Base alignment program (Brodie, R., et. al. Base-By-Base: Single nucleotide-level analysis of whole viral genome alignments, BMC Bioinformatics, 5, 96, 2004). In an embodiment, the subject disclosure relates to calculating percent identity between two polynucleotides or amino acid sequences using the DECIPHER alignment program (E S Wright (2015) “DECIPHER: harnessing local sequence context to improve protein multiple sequence alignment.” BMC Bioinformatics, doi:10.1186/s12859-015-0749-z.). In an embodiment, the subject disclosure relates to calculating percent identity between two polynucleotides or amino acid sequences using the FSA alignment program (Bradley, R K, et. al. (2009) Fast Statistical Alignment. PLOS Computational Biology. 5:e1000392). In an embodiment, the subject disclosure relates to calculating percent identity between two polynucleotides or amino acid sequences using the Geneious alignment program (Kearse, M., et. al. (2012). Geneious Basic: an integrated and extendable desktop software platform for the organization and analysis of sequence data. Bioinformatics, 28 (12), 1647-49). In an embodiment, the subject disclosure relates to calculating percent identity between two polynucleotides or amino acid sequences using the Kalign alignment program (Lassmann, T. & Sonnhammer, E. Kalign—an accurate and fast multiple sequence alignment algorithm. BMC Bioinformatics 2005 6:298). In an embodiment, the subject disclosure relates to calculating percent identity between two polynucleotides or amino acid sequences using the MAVID alignment program (Bray, N. & Pachter, L. MAVID: Constrained Ancestral Alignment of Multiple Sequences. Genome Res. 2004 April; 14(4): 693-99). In an embodiment, the subject disclosure relates to calculating percent identity between two polynucleotides or amino acid sequences using the MSA alignment program (Lipman, D J, et.al. A tool for multiple sequence alignment. Proc. Nat'l Acad. Sci. USA. 1989; 86:4412-15). In an embodiment, the subject disclosure relates to calculating percent identity between two polynucleotides or amino acid sequences using the MultAlin alignment program (Corpet, F., Multiple sequence alignment with hierarchial clustering. Nucl. Acids Res., 1988, 16(22), 10881-90). In an embodiment, the subject disclosure relates to calculating percent identity between two polynucleotides or amino acid sequences using the LAGAN or MLAGAN alignment programs (Brudno, et. al. LAGAN and Multi-LAGAN: efficient tools for large-scale multiple alignment of genomic DNA. Genome Research 2003 April; 13(4): 721-31). In an embodiment, the subject disclosure relates to calculating percent identity between two polynucleotides or amino acid sequences using the Opal alignment program (Wheeler, T. J., & Kececiouglu, J. D. Multiple alignment by aligning alignments. Proceedings of the 15^{th} ISCB conference on Intelligent Systems for Molecular Biology. Bioinformatics. 23, i559-68, 2007). In an embodiment, the subject disclosure relates to calculating percent identity between two polynucleotides or amino acid sequences using the PicXAA suite of programs, including, but not limited to, PicXAA, PicXAA-R, PicXAA-Web, etc. (Mohammad, S., Sahraeian, E. & Yoon, B. PicXAA: greedy probabilistic construction of maximum expected accuracy alignment of multiple sequences. Nucleic Acids Research. 38(15):4917-28. 2010). In an embodiment, the subject disclosure relates to calculating percent identity between two polynucleotides or amino acid sequences using the PSAlign alignment program (SZE, S.-H., Lu, Y., & Yang, Q. (2006) A polynomial time solvable formulation of multiple sequence alignment Journal of Computational Biology, 13, 309-19). In an embodiment, the subject disclosure relates to calculating percent identity between two polynucleotides or amino acid sequences using the StatAlign alignment program (Novák, Á., et.al. (2008) StatAlign: an extendable software package for joint Bayesian estimation of alignments and evolutionary trees. Bioinformatics, 24(20):2403-04). In an embodiment, the subject disclosure relates to calculating percent identity between two polynucleotides or amino acid sequences using the Gap alignment program of Needleman and Wunsch (Needleman and Wunsch, Journal of Molecular Biology 48:443-453, 1970). In an embodiment, the subject disclosure relates to calculating percent identity between two polynucleotides or amino acid sequences using the BestFit alignment program of Smith and Waterman (Smith and Waterman, Advances in Applied Mathematics, 2:482-489, 1981, Smith et al., Nucleic Acids Research 11:2205-2220, 1983). These programs produces biologically meaningful multiple sequence alignments of divergent sequences. The calculated best match alignments for the selected sequences are lined up so that identities, similarities, and differences can be seen.

[0077] The term “similarity” refers to a comparison between amino acid sequences, and takes into account not only identical amino acids in corresponding positions, but also functionally similar amino acids in corresponding positions. Thus similarity between polypeptide sequences indicates functional similarity, in addition to sequence similarity

[0078] The term “homology” is sometimes used to refer to the level of similarity between two or more nucleic acid or amino acid sequences in terms of percent of positional identity (i.e., sequence similarity or identity). Homology also refers to the concept of evolutionary relatedness, often evidenced by similar functional properties among different nucleic acids or proteins that share similar sequences.

[0079] As used herein, the term “variants” means substantially similar sequences. For nucleotide sequences, naturally occurring variants can be identified with the use of well-known molecular biology techniques, such as, for example, with polymerase chain reaction (PCR) and hybridization techniques as outlined herein.

[0080] For nucleotide sequences, a variant comprises a deletion and/or addition of one or more nucleotides at one or more internal sites within the native polynucleotide and/or a substitution of one or more nucleotides at one or more sites in the native polynucleotide. As used herein, a “native” nucleotide sequence comprises a naturally occurring nucleotide sequence. For nucleotide sequences, naturally occurring variants can be identified with the use of well-known molecular biology techniques, as, for example, with polymerase chain reaction (PCR) and hybridization techniques as outlined below. Variant nucleotide sequences also include synthetically derived nucleotide sequences, such as those generated, for example, by using site-directed mutagenesis. Generally, variants of a particular nucleotide sequence of the invention will have at least about 40%, 45%, 50% >, 55%, 60%, 65%, 70%, 75%, 80%, 85%, 90%, 91%, 92%, 93%, 94%, 95%, 96%, 97%, 98%, 99% or more sequence identity to that particular nucleotide sequence as determined by sequence alignment programs and parameters described elsewhere herein. A biologically active variant of a nucleotide sequence of the invention may differ from that sequence by as few as 1-15 nucleic acid residues, as few as 1-10, such as 6-10, as few as 5, as few as 4, 3, 2, or even 1 nucleic acid residue.

[0081] As used herein the term “operably linked” relates to a first nucleic acid sequence is operably linked with a second nucleic acid sequence when the first nucleic acid sequence is in a functional relationship with the second nucleic acid sequence. For instance, a promoter is operably linked with a coding sequence when the promoter affects the transcription or expression of the coding sequence. When recombinantly produced, operably linked nucleic acid sequences are generally contiguous and, where necessary to join two protein-coding regions, in the same reading frame. However, elements need not be contiguous to be operably linked.

[0082] As used herein, the term “promoter” refers to a region of DNA that generally is located upstream (towards the 5′ region of a gene) of a gene and is needed to initiate and drive transcription of the gene. A promoter may permit proper activation or repression of a gene that it controls. A promoter may contain specific sequences that are recognized by transcription factors. These factors may bind to a promoter DNA sequence, which results in the recruitment of RNA polymerase, an enzyme that synthesizes RNA from the coding region of the gene. The promoter generally refers to all gene regulatory elements located upstream of the gene, including, upstream promoters, 5′ UTR, introns, and leader sequences.

[0083] As used herein, the term “upstream-promoter” refers to a contiguous polynucleotide sequence that is sufficient to direct initiation of transcription. As used herein, an upstream-promoter encompasses the site of initiation of transcription with several sequence motifs, which include TATA Box, initiator sequence, TFIIB recognition elements and other promoter motifs (Jennifer, E. F. et al., (2002) Genes & Dev., 16:2583-2592). The upstream promoter provides the site of action to RNA polymerase II which is a multi-subunit enzyme with the basal or general transcription factors like, TFIIA, B, D, E, F and H. These factors assemble into a transcription pre initiation complex that catalyzes the synthesis of RNA from DNA template.

[0084] The activation of the upstream-promoter is done by the additional sequence of regulatory DNA sequence elements to which various proteins bind and subsequently interact with the transcription initiation complex to activate gene expression. These gene regulatory elements sequences interact with specific DNA-binding factors. These sequence motifs may sometimes be referred to as cis-elements. Such cis-elements, to which tissue-specific or development-specific transcription factors bind, individually or in combination, may determine the spatiotemporal expression pattern of a promoter at the transcriptional level. These cis-elements vary widely in the type of control they exert on operably linked genes. Some elements act to increase the transcription of operably-linked genes in response to environmental responses (e.g., temperature, moisture, and wounding). Other cis-elements may respond to developmental cues (e.g., germination, seed maturation, and flowering) or to spatial information (e.g., tissue specificity). See, for example, Langridge et al., (1989) Proc. Natl. Acad. Sci. USA 86:3219-23. These cis-elements are located at a varying distance from transcription start point, some cis-elements (called proximal elements) are adjacent to a minimal core promoter region while other elements can be positioned several kilobases upstream or downstream of the promoter (enhancers).

[0085] As used herein, the terms “5′ untranslated region” or “5′ UTR” is defined as the untranslated segment in the 5′ terminus of pre-mRNAs or mature mRNAs. For example, on mature mRNAs, a 5′ UTR typically harbors on its 5′ end a 7-methylguanosine cap and is involved in many processes such as splicing, polyadenylation, mRNA export towards the cytoplasm, identification of the 5′ end of the mRNA by the translational machinery, and protection of the mRNAs against degradation.

[0086] As used herein, the term “intron” refers to any nucleic acid sequence comprised in a gene (or expressed polynucleotide sequence of interest) that is transcribed but not translated. Introns include untranslated nucleic acid sequence within an expressed sequence of DNA, as well as the corresponding sequence in RNA molecules transcribed therefrom. A construct described herein can also contain sequences that enhance translation and/or mRNA stability such as introns. An example of one such intron is the first intron of gene II of the histone H3 variant of Arabidopsis thaliana or any other commonly known intron sequence. Introns can be used in combination with a promoter sequence to enhance translation and/or mRNA stability.

[0087] As used herein, the terms “transcription terminator” or “terminator” is defined as the transcribed segment in the 3′ terminus of pre-mRNAs or mature mRNAs. For example, longer stretches of DNA beyond “polyadenylation signal” site is transcribed as a pre-mRNA. This DNA sequence usually contains transcription termination signal for the proper processing of the pre-mRNA into mature mRNA.

[0088] As used herein, the term “3′ untranslated region” or “3′ UTR” is defined as the untranslated segment in a 3′ terminus of the pre-mRNAs or mature mRNAs. For example, on mature mRNAs this region harbors the poly-(A) tail and is known to have many roles in mRNA stability, translation initiation, and mRNA export. In addition, the 3′ UTR is considered to include the polyadenylation signal and transcription terminator.

[0089] As used herein, the term “polyadenylation signal” designates a nucleic acid sequence present in mRNA transcripts that allows for transcripts, when in the presence of a poly-(A) polymerase, to be polyadenylated on the polyadenylation site, for example, located 10 to 30 bases downstream of the poly-(A) signal. Many polyadenylation signals are known in the art and are useful for the present invention. An exemplary sequence includes AAUAAA and variants thereof, as described in Loke J., et al., (2005) Plant Physiology 138(3); 1457-1468.

[0090] A “DNA binding transgene” is a polynucleotide coding sequence that encodes a DNA binding protein. The DNA binding protein is subsequently able to bind to another molecule. A binding protein can bind to, for example, a DNA molecule (a DNA-binding protein), a RNA molecule (an RNA-binding protein), and/or a protein molecule (a protein-binding protein). In the case of a protein-binding protein, it can bind to itself (to form homodimers, homotrimers, etc.) and/or it can bind to one or more molecules of a different protein or proteins. A binding protein can have more than one type of binding activity. For example, zinc finger proteins have DNA-binding, RNA-binding, and protein-binding activity.

[0091] Examples of DNA binding proteins include; meganucleases, zinc fingers, CRISPRs, and TALEN binding domains that can be “engineered” to bind to a predetermined nucleotide sequence. Typically, the engineered DNA binding proteins (e.g., zinc fingers, CRISPRs, or TALENs) are proteins that are non-naturally occurring. Non-limiting examples of methods for engineering DNA-binding proteins are design and selection. A designed DNA binding protein is a protein not occurring in nature whose design/composition results principally from rational criteria. Rational criteria for design include application of substitution rules and computerized algorithms for processing information in a database storing information of existing ZFP, CRISPR, and/or TALEN designs and binding data. See, for example, U.S. Pat. Nos. 6,140,081; 6,453,242; and 6,534,261; see also WO 98/53058; WO 98/53059; WO 98/53060; WO 02/016536 and WO 03/016496 and U.S. Publication Nos. 20110301073, 20110239315 and 20119145940.

[0092] A “zinc finger DNA binding protein” (or binding domain) is a protein, or a domain within a larger protein, that binds DNA in a sequence-specific manner through one or more zinc fingers, which are regions of amino acid sequence within the binding domain whose structure is stabilized through coordination of a zinc ion. The term zinc finger DNA binding protein is often abbreviated as zinc finger protein or ZFP. Zinc finger binding domains can be “engineered” to bind to a predetermined nucleotide sequence. Non-limiting examples of methods for engineering zinc finger proteins are design and selection. A designed zinc finger protein is a protein not occurring in nature whose design/composition results principally from rational criteria. Rational criteria for design include application of substitution rules and computerized algorithms for processing information in a database storing information of existing ZFP designs and binding data. See, for example, U.S. Pat. Nos. 6,140,081; 6,453,242; 6,534,261 and 6,794,136; see also WO 98/53058; WO 98/53059; WO 98/53060; WO 02/016536 and WO 03/016496.

[0093] In other examples, the DNA-binding domain of one or more of the nucleases comprises a naturally occurring or engineered (non-naturally occurring) TAL effector DNA binding domain. See, e.g., U.S. Patent Publication No. 20110301073, incorporated by reference in its entirety herein. The plant pathogenic bacteria of the genus Xanthomonas are known to cause many diseases in important crop plants. Pathogenicity of Xanthomonas depends on a conserved type III secretion (T3S) system which injects more than different effector proteins into the plant cell. Among these injected proteins are transcription activator-like (TALEN) effectors which mimic plant transcriptional activators and manipulate the plant transcriptome (see Kay et al., (2007) Science 318:648-651). These proteins contain a DNA binding domain and a transcriptional activation domain. One of the most well characterized TAL-effectors is AvrBs3 from Xanthomonas campestgris pv. Vesicatoria (see Bonas et al., (1989) μMol Gen Genet 218: 127-136 and WO2010079430). TAL-effectors contain a centralized domain of tandem repeats, each repeat containing approximately 34 amino acids, which are key to the DNA binding specificity of these proteins. In addition, they contain a nuclear localization sequence and an acidic transcriptional activation domain (for a review see Schornack S, et al., (2006) J Plant Physiol 163(3): 256-272). In addition, in the phytopathogenic bacteria Ralstonia solanacearum two genes, designated brg11 and hpx17 have been found that are homologous to the AvrBs3 family of Xanthomonas in the R. solanacearum biovar strain GMI1000 and in the biovar 4 strain RS1000 (See Heuer et al., (2007) Appl and Enviro Micro 73(13): 4379-4384). These genes are 98.9% identical in nucleotide sequence to each other but differ by a deletion of 1,575 bp in the repeat domain of hpx17. However, both gene products have less than 40% sequence identity with AvrBs3 family proteins of Xanthomonas. See, e.g., U.S. Patent Publication No. 20110301073, incorporated by reference in its entirety.

[0094] Specificity of these TAL effectors depends on the sequences found in the tandem repeats. The repeated sequence comprises approximately 102 bp and the repeats are typically 91-100% homologous with each other (Bonas et al., ibid). Polymorphism of the repeats is usually located at positions 12 and 13 and there appears to be a one-to-one correspondence between the identity of the hypervariable diresidues at positions 12 and 13 with the identity of the contiguous nucleotides in the TAL-effector's target sequence (see Moscou and Bogdanove, (2009) Science 326:1501 and Boch et al., (2009) Science 326:1509-1512). Experimentally, the natural code for DNA recognition of these TAL-effectors has been determined such that an HD sequence at positions 12 and 13 leads to a binding to cytosine (C), NG binds to T, NI to A, C, G or T, NN binds to A or G, and ING binds to T. These DNA binding repeats have been assembled into proteins with new combinations and numbers of repeats, to make artificial transcription factors that are able to interact with new sequences and activate the expression of a non-endogenous reporter gene in plant cells (Boch et al., ibid). Engineered TAL proteins have been linked to a FokI cleavage half domain to yield a TAL effector domain nuclease fusion (TALEN) exhibiting activity in a yeast reporter assay (plasmid based target).

[0095] The CRISPR (Clustered Regularly Interspaced Short Palindromic Repeats)/Cas (CRISPR Associated) nuclease system is a recently engineered nuclease system based on a bacterial system that can be used for genome engineering. It is based on part of the adaptive immune response of many bacteria and Archaea. When a virus or plasmid invades a bacterium, segments of the invader's DNA are converted into CRISPR RNAs (crRNA) by the ‘immune’ response. This crRNA then associates, through a region of partial complementarity, with another type of RNA called tracrRNA to guide the Cas9 nuclease to a region homologous to the crRNA in the target DNA called a “protospacer.” Cas9 cleaves the DNA to generate blunt ends at the double-stranded break (DSB) at sites specified by a 20-nucleotide guide sequence contained within the crRNA transcript. Cas9 requires both the crRNA and the tracrRNA for site specific DNA recognition and cleavage. This system has now been engineered such that the crRNA and tracrRNA can be combined into one molecule (the “single guide RNA”), and the crRNA equivalent portion of the single guide RNA can be engineered to guide the Cas9 nuclease to target any desired sequence (see Jinek et al., (2012) Science 337, pp. 816-821, Jinek et al., (2013), eLife 2:e00471, and David Segal, (2013) eLife 2:e00563). In other examples, the crRNA associates with the tracrRNA to guide the Cpf1 nuclease to a region homologous to the crRNA to cleave DNA with staggered ends (see Zetsche, Bernd, et al. Cell 163.3 (2015): 759-771.). Thus, the CRISPR/Cas system can be engineered to create a DSB at a desired target in a genome, and repair of the DSB can be influenced by the use of repair inhibitors to cause an increase in error prone repair.

[0096] In other examples, the DNA binding transgene/heterologous coding sequence is a site specific nuclease that comprises an engineered (non-naturally occurring) Meganuclease (also described as a homing endonuclease). The recognition sequences of homing endonucleases or meganucleases such as I-SceI, I-CeuI, PI-PspI, PI-Sce, I-SceIV, I-CsmI, I-PanI, I-SceII, I-PpoI, I-SceIII, I-CreI, I-TevI, I-TevII and I-TevIII are known. See also U.S. Pat. Nos. 5,420,032; 6,833,252; Belfort et al., (1997) Nucleic Acids Res. 25:3379-30 3388; Dujon et al., (1989) Gene 82:115-118; Perler et al., (1994) Nucleic Acids Res. 22, 11127; Jasin (1996) Trends Genet. 12:224-228; Gimble et al., (1996) J. Mol. Biol. 263:163-180; Argast et al., (1998) J. Mol. Biol. 280:345-353 and the New England Biolabs catalogue. In addition, the

[0097] DNA-binding specificity of homing endonucleases and meganucleases can be engineered to bind non-natural target sites. See, for example, Chevalier et al., (2002) Molec. Cell 10:895-905; Epinat et al., (2003) Nucleic Acids Res. 5 31:2952-2962; Ashworth et al., (2006) Nature 441:656-659; Paques et al., (2007) Current Gene Therapy 7:49-66; U.S. Patent Publication No. 20070117128. The DNA-binding domains of the homing endonucleases and meganucleases may be altered in the context of the nuclease as a whole (i.e., such that the nuclease includes the cognate cleavage domain) or may be fused to a heterologous cleavage domain.

[0098] As used herein, the term “transformation” encompasses all techniques that a nucleic acid molecule can be introduced into such a cell. Examples include, but are not limited to: transfection with viral vectors; transformation with plasmid vectors; electroporation; lipofection; microinjection (Mueller et al., (1978) Cell 15:579-85); Agrobacterium-mediated transfer; direct DNA uptake; WHISKERS™-mediated transformation; and microprojectile bombardment. These techniques may be used for both stable transformation and transient transformation of a plant cell. “Stable transformation” refers to the introduction of a nucleic acid fragment into a genome of a host organism resulting in genetically stable inheritance. Once stably transformed, the nucleic acid fragment is stably integrated in the genome of the host organism and any subsequent generation. Host organisms containing the transformed nucleic acid fragments are referred to as “transgenic” organisms. “Transient transformation” refers to the introduction of a nucleic acid fragment into the nucleus, or DNA-containing organelle, of a host organism resulting in gene expression without genetically stable inheritance.

[0099] An exogenous nucleic acid sequence. In one example, a transgene/heterologous coding sequence is a gene sequence (e.g., an herbicide-resistance gene), a gene encoding an industrially or pharmaceutically useful compound, or a gene encoding a desirable agricultural trait. In yet another example, the transgene/heterologous coding sequence is an antisense nucleic acid sequence, wherein expression of the antisense nucleic acid sequence inhibits expression of a target nucleic acid sequence. A transgene/heterologous coding sequence may contain regulatory sequences operably linked to the transgene/heterologous coding sequence (e.g., a promoter). In some embodiments, a polynucleotide sequence of interest is a transgene. However, in other embodiments, a polynucleotide sequence of interest is an endogenous nucleic acid sequence, wherein additional genomic copies of the endogenous nucleic acid sequence are desired, or a nucleic acid sequence that is in the antisense orientation with respect to the sequence of a target nucleic acid molecule in the host organism.

[0100] As used herein, the term a transgenic “event” is produced by transformation of plant cells with heterologous DNA, i.e., a nucleic acid construct that includes a transgene/heterologous coding sequence of interest, regeneration of a population of plants resulting from the insertion of the transgene/heterologous coding sequence into the genome of the plant, and selection of a particular plant characterized by insertion into a particular genome location. The term “event” refers to the original transformant and progeny of the transformant that include the heterologous DNA. The term “event” also refers to progeny produced by a sexual outcross between the transformant and another variety that includes the genomic/transgene DNA. Even after repeated back-crossing to a recurrent parent, the inserted transgene/heterologous coding sequence DNA and flanking genomic DNA (genomic/transgene DNA) from the transformed parent is present in the progeny of the cross at the same chromosomal location. The term “event” also refers to DNA from the original transformant and progeny thereof comprising the inserted DNA and flanking genomic sequence immediately adjacent to the inserted DNA that would be expected to be transferred to a progeny that receives inserted DNA including the transgene/heterologous coding sequence of interest as the result of a sexual cross of one parental line that includes the inserted DNA (e.g., the original transformant and progeny resulting from selfing) and a parental line that does not contain the inserted DNA.

[0101] As used herein, the terms “Polymerase Chain Reaction” or “PCR” define a procedure or technique in which minute amounts of nucleic acid, RNA and/or DNA, are amplified as described in U.S. Pat. No. 4,683,195 issued Jul. 28, 1987. Generally, sequence information from the ends of the region of interest or beyond needs to be available, such that oligonucleotide primers can be designed; these primers will be identical or similar in sequence to opposite strands of the template to be amplified. The 5′ terminal nucleotides of the two primers may coincide with the ends of the amplified material. PCR can be used to amplify specific RNA sequences, specific DNA sequences from total genomic DNA, and cDNA transcribed from total cellular RNA, bacteriophage or plasmid sequences, etc. See generally Mullis et al., Cold Spring Harbor Symp. Quant. Biol., 51:263 (1987); Erlich, ed., PCR Technology, (Stockton Press, NY, 1989).

[0102] As used herein, the term “primer” refers to an oligonucleotide capable of acting as a point of initiation of synthesis along a complementary strand when conditions are suitable for synthesis of a primer extension product. The synthesizing conditions include the presence of four different deoxyribonucleotide triphosphates and at least one polymerization-inducing agent such as reverse transcriptase or DNA polymerase. These are present in a suitable buffer, which may include constituents which are co-factors or which affect conditions such as pH and the like at various suitable temperatures. A primer is preferably a single strand sequence, such that amplification efficiency is optimized, but double stranded sequences can be utilized.

[0103] As used herein, the term “probe” refers to an oligonucleotide that hybridizes to a target sequence. In the TaqMan® or TaqMan®-style assay procedure, the probe hybridizes to a portion of the target situated between the annealing site of the two primers. A probe includes about eight nucleotides, about ten nucleotides, about fifteen nucleotides, about twenty nucleotides, about thirty nucleotides, about forty nucleotides, or about fifty nucleotides. In some embodiments, a probe includes from about eight nucleotides to about fifteen nucleotides. A probe can further include a detectable label, e.g., a fluorophore (Texas-Red®, Fluorescein isothiocyanate, etc.,). The detectable label can be covalently attached directly to the probe oligonucleotide, e.g., located at the probe's 5′ end or at the probe's 3′ end. A probe including a fluorophore may also further include a quencher, e.g., Black Hole Quencher™, Iowa Black™, etc.

[0104] As used herein, the terms “restriction endonucleases” and “restriction enzymes” refer to bacterial enzymes, each of which cut double-stranded DNA at or near a specific nucleotide sequence. Type-2 restriction enzymes recognize and cleave DNA at the same site, and include but are not limited to XbaI, BamHI, HindIII, EcoRI, XhoI, SalI, KpnI, AvaI, PstI and SmaI.

[0105] As used herein, the term “vector” is used interchangeably with the terms “construct”, “cloning vector” and “expression vector” and means the vehicle by which a DNA or RNA sequence (e.g. a foreign gene) can be introduced into a host cell, so as to transform the host and promote expression (e.g. transcription and translation) of the introduced sequence. A “non-viral vector” is intended to mean any vector that does not comprise a virus or retrovirus. In some embodiments a “vector” is a sequence of DNA comprising at least one origin of DNA replication and at least one selectable marker gene. Examples include, but are not limited to, a plasmid, cosmid, bacteriophage, bacterial artificial chromosome (BAC), or virus that carries exogenous DNA into a cell. A vector can also include one or more genes, antisense molecules, and/or selectable marker genes and other genetic elements known in the art. A vector may transduce, transform, or infect a cell, thereby causing the cell to express the nucleic acid molecules and/or proteins encoded by the vector.

[0106] The term “plasmid” defines a circular strand of nucleic acid capable of autosomal replication in either a prokaryotic or a eukaryotic host cell. The term includes nucleic acid which may be either DNA or RNA and may be single- or double-stranded. The plasmid of the definition may also include the sequences which correspond to a bacterial origin of replication.

[0107] As used herein, the term “selectable marker gene” as used herein defines a gene or other expression cassette which encodes a protein which facilitates identification of cells into which the selectable marker gene is inserted. For example a “selectable marker gene” encompasses reporter genes as well as genes used in plant transformation to, for example, protect plant cells from a selective agent or provide resistance/tolerance to a selective agent. In one embodiment only those cells or plants that receive a functional selectable marker are capable of dividing or growing under conditions having a selective agent. The phrase “marker-positive” refers to plants that have been transformed to include a selectable marker gene.

[0108] As used herein, the term “detectable marker” refers to a label capable of detection, such as, for example, a radioisotope, fluorescent compound, bioluminescent compound, a chemiluminescent compound, metal chelator, or enzyme. Examples of detectable markers include, but are not limited to, the following: fluorescent labels (e.g., FITC, rhodamine, lanthanide phosphors), enzymatic labels (e.g., horseradish peroxidase, β-galactosidase, luciferase, alkaline phosphatase), chemiluminescent, biotinyl groups, predetermined polypeptide epitopes recognized by a secondary reporter (e.g., leucine zipper pair sequences, binding sites for secondary antibodies, metal binding domains, epitope tags). In an embodiment, a detectable marker can be attached by spacer arms of various lengths to reduce potential steric hindrance.

[0109] As used herein, the terms “cassette”, “expression cassette” and “gene expression cassette” refer to a segment of DNA that can be inserted into a nucleic acid or polynucleotide at specific restriction sites or by homologous recombination. As used herein the segment of DNA comprises a polynucleotide that encodes a polypeptide of interest, and the cassette and restriction sites are designed to ensure insertion of the cassette in the proper reading frame for transcription and translation. In an embodiment, an expression cassette can include a polynucleotide that encodes a polypeptide of interest and having elements in addition to the polynucleotide that facilitate transformation of a particular host cell. In an embodiment, a gene expression cassette may also include elements that allow for enhanced expression of a polynucleotide encoding a polypeptide of interest in a host cell. These elements may include, but are not limited to: a promoter, a minimal promoter, an enhancer, a response element, a terminator sequence, a polyadenylation sequence, and the like.

[0110] As used herein a “linker” or “spacer” is a bond, molecule or group of molecules that binds two separate entities to one another. Linkers and spacers may provide for optimal spacing of the two entities or may further supply a labile linkage that allows the two entities to be separated from each other. Labile linkages include photocleavable groups, acid-labile moieties, base-labile moieties and enzyme-cleavable groups. The terms “polylinker” or “multiple cloning site” as used herein defines a cluster of three or more Type-2 restriction enzyme sites located within 10 nucleotides of one another on a nucleic acid sequence. In other instances the term “polylinker” as used herein refers to a stretch of nucleotides that are targeted for joining two sequences via any known seamless cloning method (i.e., Gibson Assembly®, NEBuilder HiFID NA Assembly®, Golden Gate Assembly, BioBrick® Assembly, etc.). Constructs comprising a polylinker are utilized for the insertion and/or excision of nucleic acid sequences such as the coding region of a gene.

[0111] As used herein, the term “control” refers to a sample used in an analytical procedure for comparison purposes. A control can be “positive” or “negative”. For example, where the purpose of an analytical procedure is to detect a differentially expressed transcript or polypeptide in cells or tissue, it is generally preferable to include a positive control, such as a sample from a known plant exhibiting the desired expression, and a negative control, such as a sample from a known plant lacking the desired expression.

[0112] As used herein, the term “plant” includes a whole plant and any descendant, cell, tissue, or part of a plant. A class of plant that can be used in the present invention is generally as broad as the class of higher and lower plants amenable to mutagenesis including angiosperms (monocotyledonous and dicotyledonous plants), gymnosperms, ferns and multicellular algae. Thus, “plant” includes dicot and monocot plants. The term “plant parts” include any part(s) of a plant, including, for example and without limitation: seed (including mature seed and immature seed); a plant cutting; a plant cell; a plant cell culture; a plant organ (e.g., pollen, embryos, flowers, fruits, shoots, leaves, roots, stems, and explants). A plant tissue or plant organ may be a seed, protoplast, callus, or any other group of plant cells that is organized into a structural or functional unit. A plant cell or tissue culture may be capable of regenerating a plant having the physiological and morphological characteristics of the plant from which the cell or tissue was obtained, and of regenerating a plant having substantially the same genotype as the plant. In contrast, some plant cells are not capable of being regenerated to produce plants. Regenerable cells in a plant cell or tissue culture may be embryos, protoplasts, meristematic cells, callus, pollen, leaves, anthers, roots, root tips, silk, flowers, kernels, ears, cobs, husks, or stalks.

[0113] Plant parts include harvestable parts and parts useful for propagation of progeny plants. Plant parts useful for propagation include, for example and without limitation: seed; fruit; a cutting; a seedling; a tuber; and a rootstock. A harvestable part of a plant may be any useful part of a plant, including, for example and without limitation: flower; pollen; seedling; tuber; leaf; stem; fruit; seed; and root.

[0114] A plant cell is the structural and physiological unit of the plant, comprising a protoplast and a cell wall. A plant cell may be in the form of an isolated single cell, or an aggregate of cells (e.g., a friable callus and a cultured cell), and may be part of a higher organized unit (e.g., a plant tissue, plant organ, and plant). Thus, a plant cell may be a protoplast, a gamete producing cell, or a cell or collection of cells that can regenerate into a whole plant. As such, a seed, which comprises multiple plant cells and is capable of regenerating into a whole plant, is considered a “plant cell” in embodiments herein.

[0115] As used herein, the term “small RNA” refers to several classes of non-coding ribonucleic acid (ncRNA). The term small RNA describes the short chains of ncRNA produced in bacterial cells, animals, plants, and fungi. These short chains of ncRNA may be produced naturally within the cell or may be produced by the introduction of an exogenous sequence that expresses the short chain or ncRNA. The small RNA sequences do not directly code for a protein, and differ in function from other RNA in that small RNA sequences are only transcribed and not translated. The small RNA sequences are involved in other cellular functions, including gene expression and modification. Small RNA molecules are usually made up of about 20 to 30 nucleotides. The small RNA sequences may be derived from longer precursors. The precursors form structures that fold back on each other in self-complementary regions; they are then processed by the nuclease Dicer in animals or DCL1 in plants.

[0116] Many types of small RNA exist either naturally or produced artificially, including microRNAs (miRNAs), short interfering RNAs (siRNAs), antisense RNA, short hairpin RNA (shRNA), and small nucleolar RNAs (snoRNAs). Certain types of small RNA, such as microRNA and siRNA, are important in gene silencing and RNA interference (RNAi). Gene silencing is a process of genetic regulation in which a gene that would normally be expressed is “turned off” by an intracellular element, in this case, the small RNA. The protein that would normally be formed by this genetic information is not formed due to interference, and the information coded in the gene is blocked from expression.

[0117] As used herein, the term “small RNA” encompasses RNA molecules described in the literature as “tiny RNA” (Storz, (2002) Science 296:1260-3; Illangasekare et al., (1999) RNA 5:1482-1489); prokaryotic “small RNA” (sRNA) (Wassarman et al., (1999) Trends Microbiol. 7:37-45); eukaryotic “noncoding RNA (ncRNA)”; “micro-RNA (miRNA)”; “small non-mRNA (snmRNA)”; “functional RNA (fRNA)”; “transfer RNA (tRNA)”; “catalytic RNA” [e.g., ribozymes, including self-acylating ribozymes (Illangaskare et al., (1999) RNA 5:1482-1489); “small nucleolar RNAs (snoRNAs),” “tmRNA” (a.k.a. “10S RNA,” Muto et al., (1998) Trends Biochem Sci. 23:25-29; and Gillet et al., (2001) Mol Microbiol. 42:879-885); RNAi molecules including without limitation “small interfering RNA (siRNA),” “endoribonuclease-prepared siRNA (e-siRNA),” “short hairpin RNA (shRNA),” and “small temporally regulated RNA (stRNA),” “diced siRNA (d-siRNA),” and aptamers, oligonucleotides and other synthetic nucleic acids that comprise at least one uracil base.

[0118] Unless otherwise specifically explained, all technical and scientific terms used herein have the same meaning as commonly understood by those of ordinary skill in the art to which this disclosure belongs. Definitions of common terms in molecular biology can be found in, for example: Lewin, Genes IV, Oxford University Press, 1994 (ISBN 0-19-854287-9); Kendrew et al. (eds.), The Encyclopedia of Molecular Biology, Blackwell Science Ltd., 1994 (ISBN 0-632-02182-9); and Meyers (ed.), Molecular Biology and Biotechnology: A Comprehensive Desk Reference, VCH Publishers, Inc., 1995 (ISBN 1-56081-569-8).

### Embodiments

[0119] Provided are methods and compositions for using a cis-acting regulatory element within a chimeric regulatory molecule to express a heterologous coding sequence within a plant. In an embodiment, a cis-acting regulatory element can comprise SEQ ID NO:9, SEQ ID NOs:25-583, SEQ ID NOs:585-2268. In another embodiment, a cis-acting regulatory element shares 80%, 85%, 90%, 91%, 92%, 93%, 94%, 95%, 96%, 97%, 98%, 99%, 99.5%, 99.8%, or 100% identity to SEQ ID NO:9, SEQ ID NOs:25-583, SEQ ID NOs:585-2268. In other embodiments, the chimeric regulatory molecule comprises a promoter, a 5′ UTR or an intron operably linked to the cis-acting regulatory element. In some embodiments the cis-acting regulatory element is provided as a multiple copy within the chimeric regulatory molecule. In further embodiments, the chimeric regulatory molecule is operably linked to a heterologous coding sequence/transgene to produce a gene expression cassette. In additional embodiments, the cis-acting regulatory element modulates expression of the heterologous coding sequence to either enhance or reduce expression of the heterologous coding sequence/transgene.

[0120] In an embodiment, an isolated polynucleotide is provided comprising a cis-acting regulatory element, wherein the cis-acting regulatory element is at least 80%, 85%, 90%, 91%, 92%, 93%, 94%, 95%, 96%, 97%, 98%, 99%, 99.5%, 99.8%, or 100% identical to SEQ ID NO:9, SEQ ID NOs:25-583, SEQ ID NOs:585-2268. In an embodiment, a chimeric regulatory molecule comprises a cis-acting regulatory element comprising a polynucleotide of at least 80%, 85%, 90%, 91%, 92%, 93%, 94%, 95%, 96%, 97%, 98%, 99%, 99.5%, 99.8%, or 100% identity to the polynucleotide SEQ ID NO:9, SEQ ID NOs:25-583, SEQ ID NOs:585-2268. In an embodiment, an isolated polynucleotide is provided comprising at least 80%, 85%, 90%, 91%, 92%, 93%, 94%, 95%, 96%, 97%, 98%, 99%, 99.5%, 99.8%, or 100% identity to the polynucleotide of SEQ ID NO:9, SEQ ID NOs:25-583, SEQ ID NOs:585-2268. In an embodiment, a nucleic acid vector is provided comprising a cis-acting regulatory element that is at least 80%, 85%, 90%, 91%, 92%, 93%, 94%, 95%, 96%, 97%, 98%, 99%, 99.5%, 99.8%, or 100% SEQ ID NO:9, SEQ ID NOs:25-583,SEQ ID NOs:585-2268. In an embodiment, a chimeric regulatory molecule is provided comprising a cis-acting regulatory element that is at least 80%, 85%, 90%, 91%, 92%, 93%, 94%, 95%, 96%, 97%, 98%, 99%, 99.5%, 99.8%, or 100% identical SEQ ID NO:9, SEQ ID NOs: 25-583, SEQ ID NOs:585-2268 wherein the polynucleotide is operably linked to a chimeric regulatory molecule. In an embodiment, a chimeric regulatory molecule is provided comprising a cis-acting regulatory element is at least 80%, 85%, 90%, 91%, 92%, 93%, 94%, 95%, 96%, 97%, 98%, 99%, 99.5%, 99.8%, or 100% identical to SEQ ID NO:9, SEQ ID NOs:25-583, SEQ ID NOs:585-2268 that is operably linked to an intron. In an embodiment, a chimeric regulatory molecule is provided comprising a cis-acting regulatory element is at least 80%, 85%, 90%, 91%, 92%, 93%, 94%, 95%, 96%, 97%, 98%, 99%, 99.5%, 99.8%, or 100% identical to SEQ ID NO:9, SEQ ID NOs:25-583, SEQ ID NOs:585-2268 that is operably linked to a 5′UTR. In an embodiment, a chimeric regulatory molecule is provided comprising a cis-acting regulatory element is at least 80%, 85%, 90%, 91%, 92%, 93%, 94%, 95%, 96%, 97%, 98%, 99%, 99.5%, 99.8%, or 100% identical to SEQ ID NO:9, SEQ ID NOs:25-583, SEQ ID NOs:585-2268 that is operably linked to a polylinker. In an embodiment, a gene expression cassette is provided comprising a cis-acting regulatory element is at least 80%, 85%, 90%, 91%, 92%, 93%, 94%, 95%, 96%, 97%, 98%, 99%, 99.5%, 99.8%, or 100% identical to SEQ ID NO:9, SEQ ID NOs:25-583, SEQ ID NOs:585-2268. In an embodiment, a gene expression cassette is provided comprising a chimeric regulatory molecule element that is at least 80%, 85%, 90%, 91%, 92%, 93%, 94%, 95%, 96%, 97%, 98%, 99%, 99.5%, 99.8%, or 100% identical to SEQ ID NO:9, SEQ ID NOs:25-583, SEQ ID NOs:585-2268. In some instances the gene expression cassette comprising a cis-acting regulatory element is at least 80%, 85%, 90%, 91%, 92%, 93%, 94%, 95%, 96%, 97%, 98%, 99%, 99.5%, 99.8%, or 100% identical to SEQ ID NO:9, SEQ ID NOs:25-583, SEQ ID NOs:585-2268 further comprises a promoter, a 5′UTR, an intron, a polylinker, a heterologous coding sequence or a transgene. In an embodiment, a vector is provided comprising a cis-acting regulatory element is at least 80%, 85%, 90%, 91%, 92%, 93%, 94%, 95%, 96%, 97%, 98%, 99%, 99.5%, 99.8%, or 100% identical to SEQ ID NO:9, SEQ ID NOs:25-583, SEQ ID NOs:585-2268. In an embodiment, a vector is provided comprising a chimeric regulatory molecule element that is at least 80%, 85%, 90%, 91%, 92%, 93%, 94%, 95%, 96%, 97%, 98%, 99%, 99.5%, 99.8%, or 100% identical to SEQ ID NO:9, SEQ ID NOs:25-583, SEQ ID NOs:585-2268. In some instances the vector comprising a cis-acting regulatory element is at least 80%, 85%, 90%, 91%, 92%, 93%, 94%, 95%, 96%, 97%, 98%, 99%, 99.5%, 99.8%, or 100% identical to SEQ ID NO:9, SEQ ID NOs:25-583, SEQ ID NOs:585-2268 further comprises a promoter, a 5′UTR, an intron, a polylinker, a heterologous coding sequence or a transgene.

[0121] In an embodiment, the chimeric regulatory molecule comprises at least one copy of a cis-acting regulatory element that shares at least 80%, 85%, 90%, 91%, 92%, 93%, 94%, 95%, 96%, 97%, 98%, 99%, 99.5%, 99.8%, or 100% identical to SEQ ID NO:9, SEQ ID NOs:25-583, SEQ ID NOs:585-2268. In other embodiments, the cis-acting regulatory element is provided in the chimeric regulatory molecule as single, double, triple, quadruple copy. In additional embodiments, the cis-acting regulatory element is provided in the chimeric regulatory molecule in multiple copies; for example 1-100 copies. In further embodiments the multiple copies of the cis-acting regulatory element may be sequentially linked to one another. In other embodiments the multiple copies of the cis-acting regulatory element may be separated from one another by an intervening sequence. Such an intervening sequence may be any length, for example from 1 bp to 10,000 bp in length.

[0122] In an embodiment, chimeric regulatory molecule comprising a cis-acting regulatory element is at least 80%, 85%, 90%, 91%, 92%, 93%, 94%, 95%, 96%, 97%, 98%, 99%, 99.5%, 99.8%, or 100% identical to SEQ ID NO:9, SEQ ID NOs:25-583, SEQ ID NOs:585-2268 is operably linked to a transgene, wherein the transgene/heterologous coding sequence can be an insecticidal resistance transgene, an herbicide tolerance transgene, a nitrogen use efficiency transgene, a water use efficiency transgene, a nutritional quality transgene, a DNA binding transgene, a small RNA transgene, selectable marker transgene, or combinations thereof.

[0123] In an embodiment, a nucleic acid vector comprises a gene expression cassette as disclosed herein. In an embodiment, a vector can be a plasmid, a cosmid, a bacterial artificial chromosome (BAC), a bacteriophage, a virus, or an excised polynucleotide fragment for use in direct transformation or gene targeting such as a donor DNA.

[0124] Another aspect of the subject disclosure comprises a functional variant which differs in one or more nucleotides from those of the nucleotide sequences comprising the regulatory element, provided herein. Such a variant is produced as the result of one or more modifications (e.g., deletion, rearrangement, or insertion) of the nucleotide sequences comprising the sequence described herein. For example, fragments and variants of SEQ ID NO:9, SEQ ID NOs:25-583, SEQ ID NOs:585-2268 may be fused with a regulatory element to produce a chimeric regulatory element. This chimeric regulatory element can be used in a DNA construct or in a gene expression cassette to drive expression of a heterologous coding sequence. As used herein, the term “fragment” refers to a portion of the nucleic acid sequence. Fragments of cis-acting regulatory elements of SEQ ID NO:9, SEQ ID NOs:25-583, SEQ ID NOs:585-2268 may retain the biological activity of modulating expression by initiating transcription to drive enhanced expression. Fragments of a nucleotide sequence for the cis-acting regulatory elements of SEQ ID NO:9, SEQ ID NOs:25-583, SEQ ID NOs:585-2268 may range from at least about 4 nucleotides, 5 nucleotides, 6 nucleotides, 7 nucleotides, 8 nucleotides, 9 nucleotides, 10 nucleotides, 11 nucleotides, 12 nucleotides, 13 nucleotides, 14 nucleotides, 15 nucleotides, 16 nucleotides, 17 nucleotides, 18 nucleotides, 19 nucleotides, 20 nucleotides, 21 nucleotides, 22 nucleotides, 23 nucleotides, 24 nucleotides, 25 nucleotides, 26 nucleotides, 27 nucleotides, 28 nucleotides, 29 nucleotides, 30 nucleotides, 31 nucleotides, 32 nucleotides, 33 nucleotides, or up to the full-length nucleotide sequence of the cis-acting regulatory element.

[0125] A biologically active portion of a cis-acting regulatory element of SEQ ID NO:9, SEQ ID NOs:25-583, SEQ ID NOs:585-2268 can be prepared by isolating a portion of the cis-acting regulatory elements of SEQ ID NO:9, SEQ ID NOs:25-583, SEQ ID NOs:585-2268, and assessing the biological activity of the portion of the cis-acting regulatory element to modulate transcription of a heterologous coding sequence or a transgene. Nucleic acid molecules that are fragments of a cis-acting regulatory element of SEQ ID NO:9, SEQ ID NOs:25-583, SEQ ID NOs:585-2268 comprise at least about 4 nucleotides, 5 nucleotides, 6 nucleotides, 7 nucleotides, 8 nucleotides, 9 nucleotides, 10 nucleotides, 11 nucleotides, 12 nucleotides, 13 nucleotides, 14 nucleotides, 15 nucleotides, 16 nucleotides, 17 nucleotides, 18 nucleotides, 19 nucleotides, 20 nucleotides, 21 nucleotides, 22 nucleotides, 23 nucleotides, 24 nucleotides, 25 nucleotides, 26 nucleotides, 27 nucleotides, 28 nucleotides, 29 nucleotides, 30 nucleotides, 31 nucleotides, 32 nucleotides, 33 nucleotides, or up to the full-length nucleotide sequence of the cis-acting regulatory element of SEQ ID NO:9, SEQ ID NOs:25-583, SEQ ID NOs:585-2268 as disclosed herein.

[0126] A biologically active portion of a cis-acting regulatory element of SEQ ID NO:9, SEQ ID NOs:25-583, SEQ ID NOs:585-2268 can be prepared by isolating a portion of the cis-acting regulatory elements of SEQ ID NO:9, SEQ ID NOs:25-583, SEQ ID NOs:585-2268, and assessing the biological activity of the portion of the cis-acting regulatory element to enhance expression of a heterologous coding sequence or a transgene. Nucleic acid molecules that are fragments of a cis-acting regulatory element of SEQ ID NO:9, SEQ ID NOs:25-583, SEQ ID NOs:585-2268 comprise at least about 4 nucleotides, 5 nucleotides, 6 nucleotides, 7 nucleotides, 8 nucleotides, 9 nucleotides, 10 nucleotides, 11 nucleotides, 12 nucleotides, 13 nucleotides, 14 nucleotides, 15 nucleotides, 16 nucleotides, 17 nucleotides, 18 nucleotides, 19 nucleotides, 20 nucleotides, 21 nucleotides, 22 nucleotides, 23 nucleotides, 24 nucleotides, 25 nucleotides, 26 nucleotides, 27 nucleotides, 28 nucleotides, 29 nucleotides, 30 nucleotides, 31 nucleotides, 32 nucleotides, 33 nucleotides, or up to the full-length nucleotide sequence of the cis-acting regulatory element of SEQ ID NO:9, SEQ ID NOs:25-583, SEQ ID NOs:585-2268 as disclosed herein.

[0127] Variant nucleotide sequences also encompass sequences derived from a mutagenic and recombinogenic procedure such as DNA shuffling. With such a procedure, the cis-acting regulatory elements of SEQ ID NO:9, SEQ ID NOs:25-583, SEQ ID NOs:585-2268 can be manipulated to create a new cis-acting regulatory element. In this manner, libraries of recombinant polynucleotides are generated from a population of related sequence polynucleotides comprising sequence regions that have substantial sequence identity and can be homologously recombined in vitro or in vivo. Strategies for such DNA shuffling are known in the art. See, for example, Stemmer (1994) Proc. Natl. Acad. Sci. USA i: 10747-10751; Stemmer (1994) Nature 570:389-391; Crameri et al. (1997) Nature Biotech. 75:436-438; Moore et al. (1997) J. Mol. Biol. 272:336-347; Zhang et al. (1997) Proc. Natl. Acad. Sci. USA £4:4504-4509; Crameri et al. (1998) Nature 527:288-291; and U.S. Pat. Nos. 5,605,793 and 5,837,458.

[0128] The nucleotide sequences of the subject disclosure can be used to isolate corresponding sequences from other organisms, particularly other plants, more particularly other monocots. In this manner, methods such as PCR, hybridization, and the like can be used to identify such sequences based on their sequence homology to the sequences set forth herein. Sequences isolated based on their sequence identity to the entire cis-acting regulatory element of SEQ ID NO:9, SEQ ID NOs:25-583, SEQ ID NOs:585-2268 set forth herein or to fragments thereof are encompassed by the present invention.

[0129] In a PCR approach, oligonucleotide primers can be designed for use in PCR reactions to amplify corresponding DNA sequences from genomic DNA extracted from any plant of interest. Methods for designing PCR primers and PCR cloning are generally known in the art and are disclosed in Sambrook et al. (1989) Molecular Cloning: A Laboratory Manual (2d ed., Cold Spring Harbor Laboratory Press, Plainview, New York), hereinafter Sambrook. See also Innis et al., eds. (1990) PCR Protocols: A Guide to Methods and Applications (Academic Press, New York); Innis and Gelfand, eds. (1995) PCR Strategies (Academic Press, New York); and Innis and Gelfand, eds. (1999) PCR Methods Manual (Academic Press, New York). Known methods of PCR include, but are not limited to, methods using paired primers, nested primers, single specific primers, degenerate primers, gene-specific primers, vector-specific primers, partially-mismatched primers, and the like.

[0130] In hybridization techniques, all or part of a known nucleotide sequence is used as a probe that selectively hybridizes to other corresponding nucleotide sequences present in a population of cloned genomic DNA fragments from a chosen organism. The hybridization probes may be labeled with a detectable group such as P³² or any other detectable marker. Thus, for example, probes for hybridization can be made by labeling synthetic oligonucleotides based on the cis-acting regulatory element of SEQ ID NO:9, SEQ ID NOs:25-583, SEQ ID NOs:585-2268 of the subject disclosure. Methods for preparation of probes for hybridization and for construction of genomic libraries are generally known in the art and are disclosed in Sambrook. For example, the entire the cis-acting regulatory element of SEQ ID NO:9, SEQ ID NOs:25-583, SEQ ID NOs:585-2268 disclosed herein, or one or more portions thereof, may be used as a probe capable of specifically hybridizing to corresponding cis-acting regulatory elements. To achieve specific hybridization under a variety of conditions, such probes include sequences that are unique among the cis-acting regulatory element of SEQ ID NO:9, SEQ ID NOs:25-583, SEQ ID NOs:585-2268 and are at least about 10 nucleotides in length or at least about 20 nucleotides in length. Such probes may be used to amplify corresponding the cis-acting regulatory element from a chosen plant by PCR. This technique may be used to isolate additional coding sequences from a desired organism, or as a diagnostic assay to determine the presence of coding sequences in an organism. Hybridization techniques include hybridization screening of plated DNA libraries (either plaques or colonies; see, for example, Sambrook).

[0131] In accordance with one embodiment the nucleic acid vector further comprises a sequence encoding a selectable maker. In accordance with one embodiment the recombinant gene cassette is operably linked to an Agrobacterium T-DNA border. In accordance with one embodiment the recombinant gene cassette further comprises a first and second T-DNA border, wherein the first T-DNA border is operably linked to one end of a gene construct, and the second T-DNA border is operably linked to the other end of a gene construct. The first and second Agrobacterium T-DNA borders can be independently selected from T-DNA border sequences originating from bacterial strains selected from the group consisting of a nopaline synthesizing Agrobacterium T-DNA border, an ocotopine synthesizing Agrobacterium T-DNA border, a mannopine synthesizing Agrobacterium T-DNA border, a succinamopine synthesizing Agrobacterium T-DNA border, or any combination thereof. In one embodiment an Agrobacterium strain selected from the group consisting of a nopaline synthesizing strain, a mannopine synthesizing strain, a succinamopine synthesizing strain, or an octopine synthesizing strain is provided, wherein said strain comprises a plasmid wherein the plasmid comprises a transgene/heterologous coding sequence operably linked to a sequence selected from a cis-acting regulatory element that is at least 80%, 85%, 90%, 91%, 92%, 93%, 94%, 95%, 96%, 97%, 98%, 99%, 99.5%, 99.8%, or 100% identical to SEQ ID NO:9, SEQ ID NOs:25-583, SEQ ID NOs:585-2268. In another embodiment, the first and second Agrobacterium T-DNA borders can be independently selected from T-DNA border sequences originating from bacterial strains selected from the group consisting of a nopaline synthesizing Agrobacterium T-DNA border, an ocotopine synthesizing Agrobacterium T-DNA border, a mannopine synthesizing Agrobacterium T-DNA border, a succinamopine synthesizing Agrobacterium T-DNA border, or any combination thereof. In an embodiment an Agrobacterium strain selected from the group consisting of a nopaline synthesizing strain, a mannopine synthesizing strain, a succinamopine synthesizing strain, or an octopine synthesizing strain is provided, wherein said strain comprises a plasmid wherein the plasmid comprises a transgene/heterologous coding sequence operably linked to a sequence selected from a cis-acting regulatory element or a chimeric regulatory molecule that is at least 80%, 85%, 90%, 91%, 92%, 93%, 94%, 95%, 96%, 97%, 98%, 99%, 99.5%, 99.8%, or 100% identical to SEQ ID NO:9, SEQ ID NOs:25-583, SEQ ID NOs:585-2268.

### Traits For Introgression

[0132] In some embodiments a chimeric regulatory element comprising SEQ ID NO:9, SEQ ID NOs:25-583, SEQ ID NOs:585-2268 can be used to drive the expression of a heterologous coding sequence (for example, a transgene of interest) in a plant.

[0133] Transgenes of interest may be expressed by a chimeric regulatory element comprising SEQ ID NO:9, SEQ ID NOs:25-583, SEQ ID NOs:585-2268 of the subject disclosure. Exemplary transgenes of interest that are suitable for use in the present disclosed constructs include, but are not limited to, coding sequences that confer (1) resistance to pests or disease, (2) tolerance to herbicides, (3) value added agronomic traits, such as; yield improvement, nitrogen use efficiency, water use efficiency, and nutritional quality, (4) binding of a protein to DNA in a site specific manner, (5) expression of small RNA, and (6) selectable markers. In accordance with one embodiment, the chimeric regulatory element comprising SEQ ID NO:9, SEQ ID NOs:25-583, SEQ ID NOs:585-2268 is used to drive expression of a transgene/heterologous coding sequence encoding a selectable marker or a gene product conferring insecticidal resistance, herbicide tolerance, small RNA expression, nitrogen use efficiency, water use efficiency, or nutritional quality.

### 1. Insect Resistance

[0134] Various insect resistance genes can be expressed by a chimeric regulatory element comprising SEQ ID NO:9, SEQ ID NOs:25-583, SEQ ID NOs:585-2268. The chimeric regulatory element comprising SEQ ID NO:9, SEQ ID NOs:25-583, SEQ ID NOs:585-2268 can be operably linked with at least one other gene expression cassette containing an insect resistance gene. The operably linked sequences can then be incorporated into a chosen vector to allow for identification and selection of transformed plants (“transformants”). Exemplary insect resistance coding sequences are known in the art. As embodiments of insect resistance coding sequences that can be operably linked to the regulatory elements of the subject disclosure, the following traits are provided. Coding sequences that provide exemplary Lepidopteran insect resistance include: cry1A; cry1A.105; cry1Ab; cry1Ab (truncated); cry1Ab-Ac (fusion protein); cry1Ac (marketed as Widestrike®); cry1C; cry1F (marketed as Widestrike®); cry1Fa2; cry2Ab2; cry2Ae; cry9C; mocry1F; pinII (protease inhibitor protein); vip3A(a); and vip3Aa20. Coding sequences that provide exemplary Coleopteran insect resistance include: cry34Ab1 (marketed as Herculex®); cry35Ab1 (marketed as Herculex®); cry3A; cry3Bb1; dvsnf7; and mcry3A. Coding sequences that provide exemplary multi-insect resistance include ecry31.Ab. The above list of insect resistance genes is not meant to be limiting. Any insect resistance genes are encompassed by the present disclosure.

### 2. Herbicide Tolerance

[0135] Various herbicide tolerance genes be can be expressed by a chimeric regulatory element comprising SEQ ID NO:9, SEQ ID NOs:25-583, SEQ ID NOs:585-2268. The chimeric regulatory element comprising SEQ ID NO:9, SEQ ID NOs:25-583, SEQ ID NOs:585-2268 can be operably linked with at least one other gene expression cassette containing a herbicide tolerance gene. The operably linked sequences can then be incorporated into a chosen vector to allow for identification and selection of transformed plants (“transformants”). Exemplary herbicide tolerance coding sequences are known in the art. As embodiments of herbicide tolerance coding sequences that can be operably linked to the regulatory elements of the subject disclosure, the following traits are provided. The glyphosate herbicide contains a mode of action by inhibiting the EPSPS enzyme (5-enolpyruvylshikimate-3-phosphate synthase). This enzyme is involved in the biosynthesis of aromatic amino acids that are essential for growth and development of plants. Various enzymatic mechanisms are known in the art that can be utilized to inhibit this enzyme. The genes that encode such enzymes can be operably linked to the gene regulatory elements of the subject disclosure. In an embodiment, selectable marker genes include, but are not limited to genes encoding glyphosate resistance genes include: mutant EPSPS genes such as 2mEPSPS genes, cp4 EPSPS genes, mEPSPS genes, dgt-28 genes; aroA genes; and glyphosate degradation genes such as glyphosate acetyl transferase genes (gat) and glyphosate oxidase genes (gox). These traits are currently marketed as Gly-Tol™, Optimum® GAT®, Agrisure® GT and Roundup Ready®. Resistance genes for glufosinate and/or bialaphos compounds include dsm-2, bar and pat genes. The bar and pat traits are currently marketed as LibertyLink®. Also included are tolerance genes that provide resistance to 2,4-D such as aad-1 genes (it should be noted that aad-1 genes have further activity on arloxyphenoxypropionate herbicides) and aad-12 genes (it should be noted that aad-12 genes have further activity on pyidyloxyacetate synthetic auxins). These traits are marketed as Enlist® crop protection technology. Resistance genes for ALS inhibitors (sulfonylureas, imidazolinones, triazolopyrimidines, pyrimidinylthiobenzoates, and sulfonylamino-carbonyl-triazolinones) are known in the art. These resistance genes most commonly result from point mutations to the ALS encoding gene sequence. Other ALS inhibitor resistance genes include hra genes, the csr1-2 genes, Sr-HrA genes, and surB genes. Some of the traits are marketed under the tradename Clearfield®. Herbicides that inhibit HPPD include the pyrazolones such as pyrazoxyfen, benzofenap, and topramezone; triketones such as mesotrione, sulcotrione, tembotrione, benzobicyclon; and diketonitriles such as isoxaflutole. These exemplary HPPD herbicides can be tolerated by known traits. Examples of HPPD inhibitors include hppdPF_W336 genes (for resistance to isoxaflutole) and avhppd-03 genes (for resistance to meostrione). An example of oxynil herbicide tolerant traits include the bxn gene, which has been showed to impart resistance to the herbicide/antibiotic bromoxynil. Resistance genes for dicamba include the dicamba monooxygenase gene (dmo) as disclosed in International PCT Publication No. WO 2008/105890. Resistance genes for PPO or PROTOX inhibitor type herbicides (e.g., acifluorfen, butafenacil, flupropazil, pentoxazone, carfentrazone, fluazolate, pyraflufen, aclonifen, azafenidin, flumioxazin, flumiclorac, bifenox, oxyfluorfen, lactofen, fomesafen, fluoroglycofen, and sulfentrazone) are known in the art. Exemplary genes conferring resistance to PPO include over expression of a wild-type Arabidopsis thaliana PPO enzyme (Lermontova I and Grimm B, (2000) Overexpression of plastidic protoporphyrinogen IX oxidase leads to resistance to the diphenyl-ether herbicide acifluorfen. Plant Physiol 122:75-83.), the B. subtilis PPO gene (Li, X. and Nicholl D. 2005. Development of PPO inhibitor-resistant cultures and crops. Pest Manag. Sci. 61:277-285 and Choi K W, Han O, Lee H J, Yun Y C, Moon Y H, Kim M K, Kuk Y I, Han S U and Guh J O, (1998) Generation of resistance to the diphenyl ether herbicide, oxyfluorfen, via expression of the Bacillus subtilis protoporphyrinogen oxidase gene in transgenic tobacco plants. Biosci Biotechnol Biochem 62:558-560.) Resistance genes for pyridinoxy or phenoxy proprionic acids and cyclohexones include the ACCase inhibitor-encoding genes (e.g., Acc1-S1, Acc1-S2 and Acc1-S3). Exemplary genes conferring resistance to cyclohexanediones and/or aryloxyphenoxypropanoic acid include haloxyfop, diclofop, fenoxyprop, fluazifop, and quizalofop. Finally, herbicides can inhibit photosynthesis, including triazine or benzonitrile are provided tolerance by psbA genes (tolerance to triazine), 1+ genes (tolerance to triazine), and nitrilase genes (tolerance to benzonitrile). The above list of herbicide tolerance genes is not meant to be limiting. Any herbicide tolerance genes are encompassed by the present disclosure.

### 3. Agronomic Traits

[0136] Various agronomic trait genes can be can be expressed by a chimeric regulatory element comprising SEQ ID NO:9, SEQ ID NOs:25-583, SEQ ID NOs:585-2268. The chimeric regulatory element comprising SEQ ID NO:9, SEQ ID NOs:25-583, SEQ ID NOs:585-2268 can be operably linked with at least one other gene expression cassette containing an agronomic trait gene. The operably linked sequences can then be incorporated into a chosen vector to allow for identification and selection of transformed plants (“transformants”). Exemplary agronomic trait coding sequences are known in the art. As embodiments of agronomic trait coding sequences that can be operably linked to the regulatory elements of the subject disclosure, the following traits are provided. Delayed fruit softening as provided by the pg genes inhibit the production of polygalacturonase enzyme responsible for the breakdown of pectin molecules in the cell wall, and thus causes delayed softening of the fruit. Further, delayed fruit ripening/senescence of acc genes act to suppress the normal expression of the native acc synthase gene, resulting in reduced ethylene production and delayed fruit ripening. Whereas, the accd genes metabolize the precursor of the fruit ripening hormone ethylene, resulting in delayed fruit ripening. Alternatively, the sam-k genes cause delayed ripening by reducing S-adenosylmethionine (SAM), a substrate for ethylene production. Drought stress tolerance phenotypes as provided by cspB genes maintain normal cellular functions under water stress conditions by preserving RNA stability and translation. Another example includes the EcBetA genes that catalyze the production of the osmoprotectant compound glycine betaine conferring tolerance to water stress. In addition, the RmBetA genes catalyze the production of the osmoprotectant compound glycine betaine conferring tolerance to water stress. Photosynthesis and yield enhancement is provided with the bbx32 gene that expresses a protein that interacts with one or more endogenous transcription factors to regulate the plant's day/night physiological processes. Ethanol production can be increase by expression of the amy797E genes that encode a thermostable alpha-amylase enzyme that enhances bioethanol production by increasing the thermostability of amylase used in degrading starch. Finally, modified amino acid compositions can result by the expression of the cordapA genes that encode a dihydrodipicolinate synthase enzyme that increases the production of amino acid lysine. The above list of agronomic trait coding sequences is not meant to be limiting. Any agronomic trait coding sequence is encompassed by the present disclosure.

### 4. DNA Binding Proteins

[0137] Various DNA binding transgene/heterologous coding sequences can be can be expressed by a chimeric regulatory element comprising SEQ ID NO:9, SEQ ID NOs:25-583, SEQ ID NOs:585-2268. The chimeric regulatory element comprising SEQ ID NO:9, SEQ ID NOs:25-583, SEQ ID NOs:585-2268 can be operably linked with at least one other gene expression cassette containing a DNA binding gene. The operably linked sequences can then be incorporated into a chosen vector to allow for identification and selectable of transformed plants (“transformants”). Exemplary DNA binding protein coding sequences are known in the art. As embodiments of DNA binding protein coding sequences that can be operably linked to the regulatory elements of the subject disclosure, the following types of DNA binding proteins can include; Zinc Fingers, TALENS, CRISPRS, and meganucleases. The above list of DNA binding protein coding sequences is not meant to be limiting. Any DNA binding protein coding sequences is encompassed by the present disclosure.

### 5. Small RNA

[0138] Various small RNA sequences can be can be expressed by a chimeric regulatory element comprising SEQ ID NO:9, SEQ ID NOs:25-583, SEQ ID NOs:585-2268. The chimeric regulatory element comprising SEQ ID NO:9, SEQ ID NOs:25-583, SEQ ID NOs:585-2268 can be operably linked with at least one other gene expression cassette containing a small RNA sequence. The operably linked sequences can then be incorporated into a chosen vector to allow for identification and selection of transformed plants (“transformants”). Exemplary small RNA traits are known in the art. As embodiments of small RNA coding sequences that can be operably linked to the regulatory elements of the subject disclosure, the following traits are provided. For example, delayed fruit ripening/senescence of the anti-efe small RNA delays ripening by suppressing the production of ethylene via silencing of the ACO gene that encodes an ethylene-forming enzyme. The altered lignin production of ccomt small RNA reduces content of guanacyl (G) lignin by inhibition of the endogenous S-adenosyl-L-methionine: trans-caffeoyl CoA 3-O-methyltransferase (CCOMT gene). Further, the Black Spot Bruise Tolerance in Solanum verrucosum can be reduced by the Ppo5 small RNA which triggers the degradation of Ppo5 transcripts to block black spot bruise development. Also included is the dvsnf7 small RNA that inhibits Western Corn Rootworm with dsRNA containing a 240 bp fragment of the Western Corn Rootworm Snf7 gene. Modified starch/carbohydrates can result from small RNA such as the pPhL small RNA (degrades PhL transcripts to limit the formation of reducing sugars through starch degradation) and pR1 small RNA (degrades R1 transcripts to limit the formation of reducing sugars through starch degradation). Additional, benefits such as reduced acrylamide resulting from the asn1 small RNA that triggers degradation of Asn1 to impair asparagine formation and reduce polyacrylamide. Finally, the non-browning phenotype of pgas ppo suppression small RNA results in suppressing PPO to produce apples with a non-browning phenotype. The above list of small RNAs is not meant to be limiting. Any small RNA encoding sequences are encompassed by the present disclosure.

### 6. Selectable Markers

[0139] Various selectable markers also described as reporter genes can be can be expressed by a chimeric regulatory element comprising SEQ ID NO:9, SEQ ID NOs:25-583, SEQ ID NOs:585-2268. The chimeric regulatory element comprising SEQ ID NO:9, SEQ ID NOs:25-583, SEQ ID NOs:585-2268 can be operably linked with at least one other gene expression cassette containing a reporter gene. The operably linked sequences can then be incorporated into a chosen vector to allow for identification and selectable of transformed plants (“transformants”). Many methods are available to confirm expression of selectable markers in transformed plants, including for example DNA sequencing and PCR (polymerase chain reaction), Southern blotting, RNA blotting, immunological methods for detection of a protein expressed from the vector. But, usually the reporter genes are observed through visual observation of proteins that when expressed produce a colored product. Exemplary reporter genes are known in the art and encode β-glucuronidase (GUS), luciferase, green fluorescent protein (GFP), yellow fluorescent protein (YFP, Phi-YFP), red fluorescent protein (DsRFP, RFP, etc), β-galactosidase, and the like (See Sambrook, et al., Molecular Cloning: A Laboratory Manual, Third Edition, Cold Spring Harbor Press, N.Y., 2001, the content of which is incorporated herein by reference in its entirety).

[0140] Selectable marker genes are utilized for selection of transformed cells or tissues. Selectable marker genes include genes encoding antibiotic resistance, such as those encoding neomycin phosphotransferase II (NEO), spectinomycin/streptinomycin resistance (AAD), and hygromycin phosphotransferase (HPT or HGR) as well as genes conferring resistance to herbicidal compounds. Herbicide resistance genes generally code for a modified target protein insensitive to the herbicide or for an enzyme that degrades or detoxifies the herbicide in the plant before it can act. For example, resistance to glyphosate has been obtained by using genes coding for mutant target enzymes, 5-enolpyruvylshikimate-3-phosphate synthase (EPSPS). Genes and mutants for EPSPS are well known, and further described below. Resistance to glufosinate ammonium, bromoxynil, and 2,4-dichlorophenoxyacetate (2,4-D) have been obtained by using bacterial genes encoding PAT or DSM-2, a nitrilase, an AAD-1, or an AAD-12, each of which are examples of proteins that detoxify their respective herbicides.

[0141] In an embodiment, herbicides can inhibit the growing point or meristem, including imidazolinone or sulfonylurea, and genes for resistance/tolerance of acetohydroxyacid synthase (AHAS) and acetolactate synthase (ALS) for these herbicides are well known. Glyphosate resistance genes include mutant 5-enolpyruvylshikimate-3-phosphate synthase (EPSPs) and dgt-28 genes (via the introduction of recombinant nucleic acids and/or various forms of in vivo mutagenesis of native EPSPs genes), aroA genes and glyphosate acetyl transferase (GAT) genes, respectively). Resistance genes for other phosphono compounds include bar and pat genes from Streptomyces species, including Streptomyces hygroscopicus and Streptomyces viridichromogenes, and pyridinoxy or phenoxy proprionic acids and cyclohexones (ACCase inhibitor-encoding genes). Exemplary genes conferring resistance to cyclohexanediones and/or aryloxyphenoxypropanoic acid (including haloxyfop, diclofop, fenoxyprop, fluazifop, quizalofop) include genes of acetyl coenzyme A carboxylase (ACCase); Acc1-S1, Acc1-S2 and Acc1-S3. In an embodiment, herbicides can inhibit photosynthesis, including triazine (psbA and Is+genes) or benzonitrile (nitrilase gene). Futhermore, such selectable markers can include positive selection markers such as phosphomannose isomerase (PMI) enzyme.

[0142] In an embodiment, selectable marker genes include, but are not limited to genes encoding: 2,4-D; neomycin phosphotransferase II; cyanamide hydratase; aspartate kinase; dihydrodipicolinate synthase; tryptophan decarboxylase; dihydrodipicolinate synthase and desensitized aspartate kinase; bar gene; tryptophan decarboxylase; neomycin phosphotransferase (NEO); hygromycin phosphotransferase (HPT or HYG); dihydrofolate reductase (DHFR); phosphinothricin acetyltransferase; 2,2-dichloropropionic acid dehalogenase; acetohydroxyacid synthase; 5-enolpyruvyl-shikimate-phosphate synthase (aroA); haloarylnitrilase; acetyl-coenzyme A carboxylase; dihydropteroate synthase (sul I); and 32 kD photosystem II polypeptide (psbA). An embodiment also includes selectable marker genes encoding resistance to: chloramphenicol; methotrexate; hygromycin; spectinomycin; bromoxynil; glyphosate; and phosphinothricin. The above list of selectable marker genes is not meant to be limiting. Any reporter or selectable marker gene are encompassed by the present disclosure.

[0143] In some embodiments the coding sequences are synthesized for optimal expression in a plant. For example, in an embodiment, a coding sequence of a gene has been modified by codon optimization to enhance expression in plants. An insecticidal resistance transgene, an herbicide tolerance transgene, a nitrogen use efficiency transgene, a water use efficiency transgene, a nutritional quality transgene, a DNA binding transgene, or a selectable marker transgene/heterologous coding sequence can be optimized for expression in a particular plant species or alternatively can be modified for optimal expression in dicotyledonous or monocotyledonous plants. Plant preferred codons may be determined from the codons of highest frequency in the proteins expressed in the largest amount in the particular plant species of interest. In an embodiment, a coding sequence, gene, heterologous coding sequence or transgene/heterologous coding sequence is designed to be expressed in plants at a higher level resulting in higher transformation efficiency. Methods for plant optimization of genes are well known. Guidance regarding the optimization and production of synthetic DNA sequences can be found in, for example, WO2013016546, WO2011146524, WO1997013402, U.S. Pat. Nos. 6,166,302, and 5,380,831, herein incorporated by reference.

### Molecular Confirmation

[0144] Methods of confirming the presence of SEQ ID NO:9, SEQ ID NOs:25-583, SEQ ID NOs:585-2268 within the genome of a plant are known in the art. For example the detection of SEQ ID NO:9, SEQ ID NOs:25-583, SEQ ID NOs:585-2268 within the genome of a plant can be achieved, for example, by the polymerase chain reaction (PCR). The PCR detection is done by the use of two oligonucleotide primers flanking the polymorphic segment of the polymorphism followed by DNA amplification. This step involves repeated cycles of heat denaturation of the DNA followed by annealing of the primers to their complementary sequences at low temperatures, and extension of the annealed primers with DNA polymerase. Size separation of DNA fragments on agarose or polyacrylamide gels following amplification, comprises the major part of the methodology. Such selection and screening methodologies are well known to those skilled in the art. Molecular confirmation methods that can be used to identify transgenic plants are known to those with skill in the art. Several exemplary methods are further described below.

[0145] Molecular Beacons have been described for use in sequence detection. Briefly, a FRET oligonucleotide probe is designed that overlaps the flanking genomic and insert DNA junction. The unique structure of the FRET probe results in it containing a secondary structure that keeps the fluorescent and quenching moieties in close proximity. The FRET probe and PCR primers (one primer in the insert DNA sequence and one in the flanking genomic sequence) are cycled in the presence of a thermostable polymerase and dNTPs. Following successful PCR amplification, hybridization of the FRET probe(s) to the target sequence results in the removal of the probe secondary structure and spatial separation of the fluorescent and quenching moieties. A fluorescent signal indicates the presence of the flanking genomic/transgene insert sequence due to successful amplification and hybridization. Such a molecular beacon assay for detection of as an amplification reaction is an embodiment of the subject disclosure.

[0146] Hydrolysis probe assay, otherwise known as TAQMAN® (Life Technologies, Foster City, Calif.), is a method of detecting and quantifying the presence of a DNA sequence. Briefly, a FRET oligonucleotide probe is designed with one oligo within the transgene and one in the flanking genomic sequence for event-specific detection. The FRET probe and PCR primers (one primer in the insert DNA sequence and one in the flanking genomic sequence) are cycled in the presence of a thermostable polymerase and dNTPs. Hybridization of the FRET probe results in cleavage and release of the fluorescent moiety away from the quenching moiety on the FRET probe. A fluorescent signal indicates the presence of the flanking/transgene insert sequence due to successful amplification and hybridization. Such a hydrolysis probe assay for detection of as an amplification reaction is an embodiment of the subject disclosure.

[0147] KASPar® assays are a method of detecting and quantifying the presence of a DNA sequence. Briefly, the genomic DNA sample comprising the integrated gene expression cassette polynucleotide is screened using a polymerase chain reaction (PCR) based assay known as a KASPar® assay system. The KASPar® assay used in the practice of the subject disclosure can utilize a KASPar® PCR assay mixture which contains multiple primers. The primers used in the PCR assay mixture can comprise at least one forward primers and at least one reverse primer. The forward primer contains a sequence corresponding to a specific region of the DNA polynucleotide, and the reverse primer contains a sequence corresponding to a specific region of the genomic sequence. In addition, the primers used in the PCR assay mixture can comprise at least one forward primers and at least one reverse primer. For example, the KASPar® PCR assay mixture can use two forward primers corresponding to two different alleles and one reverse primer. One of the forward primers contains a sequence corresponding to specific region of the endogenous genomic sequence. The second forward primer contains a sequence corresponding to a specific region of the DNA polynucleotide. The reverse primer contains a sequence corresponding to a specific region of the genomic sequence. Such a KASPar® assay for detection of an amplification reaction is an embodiment of the subject disclosure.

[0148] In some embodiments the fluorescent signal or fluorescent dye is selected from the group consisting of a HEX fluorescent dye, a FAM fluorescent dye, a JOE fluorescent dye, a TET fluorescent dye, a Cy 3 fluorescent dye, a Cy 3.5 fluorescent dye, a Cy 5 fluorescent dye, a Cy 5.5 fluorescent dye, a Cy 7 fluorescent dye, and a ROX fluorescent dye.

[0149] In other embodiments the amplification reaction is run using suitable second fluorescent DNA dyes that are capable of staining cellular DNA at a concentration range detectable by flow cytometry, and have a fluorescent emission spectrum which is detectable by a real time thermocycler. It should be appreciated by those of ordinary skill in the art that other nucleic acid dyes are known and are continually being identified. Any suitable nucleic acid dye with appropriate excitation and emission spectra can be employed, such as YO-PRO-1®, SYTOX Green®, SYBR Green I®, SYTO11®, SYTO12®, SYTO13®, BOBO®, YOYO®, and TOTO®.

[0150] In further embodiments, Next Generation Sequencing (NGS) can be used for detection. As described by Brautigma et al., 2010, DNA sequence analysis can be used to determine the nucleotide sequence of the isolated and amplified fragment. The amplified fragments can be isolated and sub-cloned into a vector and sequenced using chain-terminator method (also referred to as Sanger sequencing) or Dye-terminator sequencing. In addition, the amplicon can be sequenced with Next Generation Sequencing. NGS technologies do not require the sub-cloning step, and multiple sequencing reads can be completed in a single reaction. Three NGS platforms are commercially available, the Genome Sequencer FLX™ from 454 Life Sciences/Roche, the Illumina Genome Analyser™ from Solexa and Applied Biosystems' SOLiD™ (acronym for: ‘Sequencing by Oligo Ligation and Detection’). In addition, there are two single molecule sequencing methods that are currently being developed. These include the true Single Molecule Sequencing (tSMS) from Helicos Bioscience™ and the Single Molecule Real Time™ sequencing (SMRT) from Pacific Biosciences.

[0151] The Genome Sequencher FLX™ which is marketed by 454 Life Sciences/Roche is a long read NGS, which uses emulsion PCR and pyrosequencing to generate sequencing reads. DNA fragments of 300-800 bp or libraries containing fragments of 3-20 kb can be used. The reactions can produce over a million reads of about 250 to 400 bases per run for a total yield of 250 to 400 megabases. This technology produces the longest reads but the total sequence output per run is low compared to other NGS technologies.

[0152] The Illumina Genome Analyser™ which is marketed by Solexa™ is a short read NGS which uses sequencing by synthesis approach with fluorescent dye-labeled reversible terminator nucleotides and is based on solid-phase bridge PCR. Construction of paired end sequencing libraries containing DNA fragments of up to 10 kb can be used. The reactions produce over 100 million short reads that are 35-76 bases in length. This data can produce from 3-6 gigabases per run.

[0153] The Sequencing by Oligo Ligation and Detection (SOLiD) system marketed by Applied Biosystems™ is a short read technology. This NGS technology uses fragmented double stranded DNA that are up to 10 kb in length. The system uses sequencing by ligation of dye-labelled oligonucleotide primers and emulsion PCR to generate one billion short reads that result in a total sequence output of up to 30 gigabases per run.

[0154] The tSMS of Helicos Bioscience™ and SMRT of Pacific Biosciences™ apply a different approach which uses single DNA molecules for the sequence reactions. The tSMS Helicos™ system produces up to 800 million short reads that result in 21 gigabases per run. These reactions are completed using fluorescent dye-labelled virtual terminator nucleotides that is described as a ‘sequencing by synthesis’ approach.

[0155] The SMRT Next Generation Sequencing system marketed by Pacific Biosciences™ uses a real time sequencing by synthesis. This technology can produce reads of up to 1,000 bp in length as a result of not being limited by reversible terminators. Raw read throughput that is equivalent to one-fold coverage of a diploid human genome can be produced per day using this technology.

### Transgenic Plants

[0156] In an embodiment, a plant, plant tissue, or plant cell comprises a chimeric regulatory element comprising SEQ ID NO:9, SEQ ID NOs:25-583, SEQ ID NOs:585-2268. In one embodiment a plant, plant tissue, or plant cell comprises the cis-acting regulatory element of a sequence selected from SEQ ID NO:9, SEQ ID NOs:25-583, SEQ ID NOs:585-2268 or a sequence that has 80%, 85%, 90%, 95% or 99.5% sequence identity with a sequence selected from SEQ ID NO:9, SEQ ID NOs:25-583, SEQ ID NOs:585-2268. In an embodiment, a plant, plant tissue, or plant cell comprises a gene expression cassette comprising a sequence selected from SEQ ID NO:9, SEQ ID NOs:25-583, SEQ ID NOs:585-2268, or a sequence that has 80%, 85%, 90%, 95% or 99.5% sequence identity with a sequence selected from SEQ ID NO:9, SEQ ID NOs:25-583, SEQ ID NOs:585-2268 that is operably linked to a heterologous coding sequence. In an illustrative embodiment, a plant, plant tissue, or plant cell comprises a gene expression cassette comprising a chimeric regulatory element comprising SEQ ID NO:9, SEQ ID NOs:25-583, SEQ ID NOs:585-2268, or a sequence that has 80%, 85%, 90%, 95% or 99.5% sequence identity with a sequence selected from SEQ ID NO:9, SEQ ID NOs:25-583, SEQ ID NOs:585-2268, wherein the chimeric regulatory element is operably linked to a transgene or heterologous coding sequence is an insecticidal resistance transgene, an herbicide tolerance transgene, a nitrogen use efficiency transgene, a water use efficiency transgene, a nutritional quality transgene, a DNA binding transgene, a selectable marker transgene, or combinations thereof.

[0157] In accordance with one embodiment a plant, plant tissue, or plant cell is provided wherein the plant, plant tissue, or plant cell comprises a cis-acting regulatory element comprising SEQ ID NO:9, SEQ ID NOs:25-583, SEQ ID NOs:585-2268 operably linked to a transgene, wherein cis-acting regulatory element comprising SEQ ID NO:9, SEQ ID NOs:25-583, SEQ ID NOs:585-2268 derived sequence comprises a sequence having 80%, 85%, 90%, 95% or 99.5% sequence identity with SEQ ID NO:9, SEQ ID NOs:25-583, SEQ ID NOs:585-2268. In one embodiment a plant, plant tissue, or plant cell is provided wherein the plant, plant tissue, or plant cell comprises a cis-acting regulatory element comprising SEQ ID NO:9, SEQ ID NOs:25-583, SEQ ID NOs:585-2268, or a sequence that has 80%, 85%, 90%, 95% or 99.5% sequence identity with SEQ ID NO:9, SEQ ID NOs:25-583, SEQ ID NOs:585-2268 operably linked to a heterologous coding sequence. In accordance with one embodiment the plant, plant tissue, or plant cell comprises a chimeric regulatory molecule comprising SEQ ID NO:9, SEQ ID NOs:25-583, SEQ ID NOs:585-2268 or a sequence having 80%, 85%, 90%, 95% or 99.5% sequence identity with SEQ ID NO:9, SEQ ID NOs:25-583, SEQ ID NOs:585-2268 operably linked to a heterologous coding sequence. In one embodiment the plant, plant tissue, or plant cell comprises a chimeric regulatory molecule operably linked to a transgene/heterologous coding sequence wherein the chimeric regulatory molecule consists of SEQ ID NO:2 or a sequence having 80%, 85%, 90%, 95% or 99.5% sequence identity with SEQ ID NO:9, SEQ ID NOs:25-583, SEQ ID NOs:585-2268. In accordance with one embodiment the gene construct comprising a chimeric regulatory molecule comprising SEQ ID NO:9, SEQ ID NOs:25-583, SEQ ID NOs:585-2268 operably linked to a transgene/heterologous coding sequence is incorporated into the genome of the plant, plant tissue, or plant cell.

[0158] In one embodiment the plant, plant tissue, or plant cell is a dicotyledonous or monocotyledonous plant or a cell or tissue derived from a dicotyledonous or monocotyledonous plant. In one embodiment the plant is selected from the group consisting of wheat, rice, sorghum, oats, rye, bananas, sugar cane, soybean, cotton, sunflower, Zea mays, alfalfa, rapeseed, canola, Indian mustard, Ethiopian mustard, beans, broccoli, cabbage, cauliflower, celery, cucumber, eggplant, lettuce; melon, pea, pepper, peanut, potato, pumpkin, radish, spinach, sugarbeet, tobacco, tomato, and watermelon.

[0159] One of skill in the art will recognize that after the exogenous sequence is stably incorporated in transgenic plants and confirmed to be operable, it can be introduced into other plants by sexual crossing. Any of a number of standard breeding techniques can be used, depending upon the species to be crossed.

[0160] The present disclosure also encompasses seeds of the transgenic plants described above, wherein the seed has the transgene/heterologous coding sequence or gene construct containing the gene regulatory elements of the subject disclosure. The present disclosure further encompasses the progeny, clones, cell lines or cells of the transgenic plants described above wherein said progeny, clone, cell line or cell has the transgene/heterologous coding sequence or gene construct containing the gene regulatory elements of the subject disclosure.

[0161] The present disclosure also encompasses the cultivation of transgenic plants described above, wherein the transgenic plant has the transgene/heterologous coding sequence or gene construct containing the gene regulatory elements of the subject disclosure. Accordingly, such transgenic plants may be engineered to, inter alia, have one or more desired traits or transgenic events containing the gene regulatory elements of the subject disclosure, by being transformed with nucleic acid molecules according to the invention, and may be cropped or cultivated by any method known to those of skill in the art.

### Method of Expressing a Transgene

[0162] In an embodiment, a method of expressing at least one transgene/heterologous coding sequence in a plant comprises growing a plant comprising a chimeric regulatory molecule comprising SEQ ID NO:9, SEQ ID NOs:25-583, SEQ ID NOs:585-2268 operably linked to at least one transgene/heterologous coding sequence or a polylinker sequence. In an embodiment the cis-acting regulatory element or a chimeric regulatory element consists of a sequence selected from SEQ ID NO:9, SEQ ID NOs:25-583, SEQ ID NOs:585-2268 or a sequence that has 80%, 85%, 90%, 95% or 99.5% sequence identity with a sequence selected from SEQ ID NO:9, SEQ ID NOs:25-583, SEQ ID NOs:585-2268. In an embodiment, a method of expressing at least one transgene/heterologous coding sequence in a plant comprising growing a plant comprising a chimeric regulatory molecule comprising SEQ ID NO:9, SEQ ID NOs:25-583, SEQ ID NOs:585-2268 operably linked to at least one transgene. In an embodiment, a method of expressing at least one transgene/heterologous coding sequence in a plant tissue or plant cell comprising culturing a plant tissue or plant cell comprising a chimeric regulatory molecule comprising SEQ ID NO:9, SEQ ID NOs:25-583, SEQ ID NOs:585-2268 operably linked to at least one transgene.

[0163] In an embodiment, a method of expressing at least one transgene/heterologous coding sequence in a plant comprises growing a plant comprising a gene expression cassette comprising a chimeric regulatory molecule comprising SEQ ID NO:9, SEQ ID NOs:25-583, SEQ ID NOs:585-2268 operably linked to at least one transgene. In one embodiment the cis acting regulatory element or a chimeric regulatory element consists of a sequence selected from SEQ ID NO:9, SEQ ID NOs:25-583, SEQ ID NOs:585-2268 or a sequence that has 80%, 85%, 90%, 95% or 99.5% sequence identity with a sequence selected from SEQ ID NO:9, SEQ ID NOs:25-583, SEQ ID NOs:585-2268. In an embodiment, a method of expressing at least one transgene/heterologous coding sequence in a plant comprises growing a plant comprising a gene expression cassette comprising a chimeric regulatory molecule comprising SEQ ID NO:9, SEQ ID NOs:25-583, SEQ ID NOs:585-2268 operably linked to at least one transgene. In an embodiment, a method of expressing at least one transgene/heterologous coding sequence in a plant comprises growing a plant or a gene expression cassette comprising a chimeric regulatory molecule comprising SEQ ID NO:9, SEQ ID NOs:25-583, SEQ ID NOs:585-2268 operably linked to at least one transgene. In an embodiment, a method of expressing at least one transgene/heterologous coding sequence in a plant tissue or plant cell comprises culturing a plant tissue or plant cell comprising a gene expression cassette containing a chimeric regulatory molecule comprising SEQ ID NO:9, SEQ ID NOs:25-583, SEQ ID NOs:585-2268 operably linked to at least one transgene. In an embodiment, a method of expressing at least one transgene/heterologous coding sequence in a plant tissue or plant cell comprises culturing a plant tissue or plant cell comprising a gene expression cassette, a chimeric regulatory molecule comprising SEQ ID NO:9, SEQ ID NOs:25-583, SEQ ID NOs:585-2268 operably linked to at least one transgene.

[0164] All references, including publications, patents, and patent applications, cited herein are hereby incorporated by reference to the extent they are not inconsistent with the explicit details of this disclosure, and are so incorporated to the same extent as if each reference were individually and specifically indicated to be incorporated by reference and were set forth in its entirety herein. The references discussed herein are provided solely for their disclosure prior to the filing date of the present application. Nothing herein is to be construed as an admission that the inventors are not entitled to antedate such disclosure by virtue of prior invention.

[0165] Embodiments of the subject disclosure are further exemplified in the following Examples. It should be understood that these Examples are given by way of illustration only. From the above embodiments and the following Examples, one skilled in the art can ascertain the essential characteristics of this disclosure, and without departing from the spirit and scope thereof, can make various changes and modifications of the embodiments of the disclosure to adapt it to various usages and conditions. Thus, various modifications of the embodiments of the disclosure, in addition to those shown and described herein, will be apparent to those skilled in the art from the foregoing description. Such modifications are also intended to fall within the scope of the appended claims. The following is provided by way of illustration and not intended to limit the scope of the invention.

### EXAMPLES

### Example 1: Identification of Cis-Acting Regulatory Elements

[0166] Cis-acting regulatory elements were obtained from the PLACE database (Higo, K., Ugawa, Y., Iwamoto, M. & Korenaga, T. 1999. “Plant cis-acting regulatory DNA elements (PLACE) database: 1999” NAR. 27:297-300.). The elements were sorted by size and a subset of ten elements were selected for testing based on the following criteria: 1) be between 18 and 24 nucleotides in length (inclusive), 2) not be overly simple in sequence, e.g., ‘TTTTTAAAAA’ and 3) not contain ambiguous nucleotides. The cis-acting regulatory elements that were obtained are listed as SEQ ID NO:1-10. The selected elements and their details are shown in Table 1.

TABLE 1
Elements selected for testing from the PLACE database.

| | | | | Cis-acting | | | |
|---|---|---|---|---|---|---|---|
| | | | | element | | | |
| | | | | cloned as a | | | |
| | Database | | SEQ | modulating | | | |
| | Entry | | ID | element of | FIG. 1 | RFU | RFU |
| Element Name | Number | Sequence | NO: | a promoter | Label: | Mean | SEM |
| CARGIATAP3 | S000347 | GTTTACATAAATGGAAAA | SEQ ID | SEQ ID | EE2873 | 11.15 | 1.00 |
| | | | NO: 1 | NO: 13 | | | |
| GLUTEBOX1OSGT3 | S000128 | TATCTAGTGAGTCACTTCA | SEQ ID | SEQ ID | EE2875 | 11.88 | 0.33 |
| | | | NO: 2 | NO: 14 | | | |
| ANAEROBICCISZMGAPC4 | S000350 | CGAAACCAGCAACGGTCCAG | SEQ ID | SEQ ID | EE2876 | 13.42 | 0.4 |
| | | | NO: 3 | NO: 15 | | | |
| GAREHVAMY1 | S000038 | GGCCGATAACAAACTCCGGCC | SEQ ID | SEQ ID | EE2877 | 10.65 | 1.52 |
| | | | NO: 4 | NO: 16 | | | |
| PE1ASPHYA3 | S000196 | GAAATAGCAAATGTTAAAAATA | SEQ ID | SEQ ID | EE2878 | 10.01 | 0.84 |
| | | | NO: 5 | NO: 17 | | | |
| 23BPUASNSCYCB1 | S000283 | TTTATTTACCAAACGGTAACATC | SEQ ID | SEQ ID | EE2879 | 7.53 | 0.45 |
| | | | NO: 6 | NO: 18 | | | |
| ELEMENT1GMLBC3 | S000319 | GATATATTAATATTTTATTTTATA | SEQ ID | SEQ ID | EE2887 | 9.63 | 0.7 |
| | | | NO: 7 | NO: 19 | | | |
| GREGIONNTPRB1B | S000364 | TGGCGGCTCTTATCTCACGTGATG | SEQ ID | SEQ ID | EE2888 | 11.26 | 0.23 |
| | | | NO: 8 | NO: 20 | | | |
| JERECRSTR | S000384 | CTCTTAGACCGCCTTCTTTGAAAG | SEQ ID | SEQ ID | EE2889 | 47.14 | 0.86 |
| | | | NO: 9 | NO: 21 | | | |
| SE1PVGRP18 | S000288 | ATAATGGGCCACACTGTGGGGCAT | SEQ ID | SEQ ID | EE2890 | 10.36 | 0.96 |
| | | | NO: 10 | NO: 22 | | | |

### Example 2: Synthesis of the Cis-Acting Regulatory Element as a Modulating Element Within a Regulatory Element (for Example a Promoter Regulatory Element)

[0167] The selected elements were engineered as a modulating element within a regulatory element (for example a promoter regulatory element). The regulatory elements were fused to a promoter as a multimer of cassettes with the intervening sequences, ‘SEQ ID NO:11; CATAAACACC’ and ‘SEQ ID NO:12; GGGCACGCGTC’ as spacers in the 5′ and 3′ positions, respectively. In this example three cassettes were synthesized into the promoter. These three cassettes were synthesized along with and upstream of the CaMV 35S minimal promoter (SEQ ID NO:13) and the TMV omega 5′ UTR (SEQ ID NO:14) by GenScript Biotech (Piscataway, NJ). The restriction endonuclease sites EcoRI and NcoI were included on the 5′ and 3′ ends of the constructs, respectively, for cloning into a standardized dicot protoplast testing vector. The final chimeric promoter that contained the cis-acting regulatory elements are provided as SEQ ID NOs:15-24.

### Example 3: Construct Design

[0168] The chimeric cis-acting regulatory element and promoter were tested as a chimeric regulatory element to determine whether the cis-acting regulatory elements could enhance the expression of a downstream coding sequence operably linked to the chimeric cis-acting regulatory element and promoter. As such, the chimeric cis-acting regulatory element and the regulatory element (for example a promoter regulatory element) were cloned upstream of a coding sequence that encoded a fluorescent protein. The standardized dicot protoplast testing vector contains two reporter protein fluorophores, ZsGreen (Matz, M. V., Fradkov, A. F., Labas, Y. A., Zaraisky, A. G., Markelov, M. L., & Lukyanov, S. A. 1999. Fluorescent proteins from the nonbioluminescent Anthozoa species. Nat Biotechnol. 17:969-973.) for measuring the effect of regulatory elements on transcription, and TagRFP (Merzlyak, E. M., Goedhart, J., Shcherbo, D., Bulina, M. E., Shcheglov, A. S. Fradkov, A. F., Gaintzeva, A., Lukyanov, K. A., Lukyanov, S., Gadella, T. W. J. and Chudakov, D. M. 2007. Bright monomeric red fluorescent protein with an extended fluorescence lifetime. Nat Methods. 4:555-557.) for normalization. The ZsGreen coding sequence was driven by the test cassettes as described above. The TagRFP coding sequence was driven by the Arabidopsis thaliana ubiquitin promoter, AT-UBIQ10. The two expression constructs were separated by four terminators, PINII (An, G., Mitra, M., Choi, H. K., Costa, M. A., An, K., Thornburg, R. W. 1989. Functional analysis of the 3′ control region of the potato wound-inducible proteinase inhibitor II gene. Plant Cell. 1:115-122.), W64A (Das et al., 1991), UBQ14 (Mayer et al., 1999) and IN2-1 (Hershey and Stoner, 1991), to prevent read-through transcription. A gene for spectinomycin resistance was included on the vector as a selectable marker for cloning purposes. The bacterial origin of replication of the vector is PUC ORI.

### Example 4: In Planta Testing of the Cis-Acting Regulatory Element

[0169] A soybean hypocotyl protoplast assay was used to test the vectors to determine whether the cis-acting regulatory elements could enhance the expression of a downstream coding sequence operably linked to the chimeric cis-acting regulatory element and a regulatory element (for example a promoter regulatory element) as a chimeric regulatory element. Protoplasts were isolated from sliced (0.5-1 mm) hypocotyl tissue from 4-5 day old soy (genotype 93Y21) seedlings and isolated using the solutions and approach as described in Wu and Hanzawa (2018) with the following modifications: 1) 0.75 M mannitol was used in all relevant solutions, 2) vacuum infiltration was 0.5 H, 3) incubation in digestion solution was 2.5 H without agitation, 4) after centrifugation, protoplasts were resuspended in MMg and allowed to rest on ice for 1 H, and 5) protoplasts were not centrifuged after resting, but rather supernatant was removed without disturbing the cell pellet and replaced with fresh MMg. Polyethylene glycol (PEG) transfection of protoplasts was carried out following Wu, F. & Hanzawa, Y. A simple method for isolating of soybean protoplasts and application to transient gene expression analyses. J Vis Exp. 131: e57258. A few modifications were made the to the Wu and Hanzawa protocol: 1) a concentration of 0.75 M mannitol and 2) a concentration of 40% PEG was used in the transfection solution, and 3) a total of 2.5 nM of plasmid DNA was used in the transfection reactions. All transfections were carried out in duplicate. After transfection, protoplasts were plated into 24-well, black glass-bottom plates, and stored at 27° C. in darkness for 16 H. Fluorescent signals emanating from protoplasts were measured using a Cytation5 (BioTek, Winooski, VT). Controls in the assay included an empty vector, i.e., no test cassette, as a background control (EE1906), and mock-treated protoplasts (no DNA). Data collected were at the cellular (object) level, with no fewer than 300 protoplasts counted per vector. In addition to fluorescent signals, the size and circularity of each protoplast was also determined.

### Example 5: Identification of a Cis-Acting Regulatory Element That Increases Expression of a Coding Sequence

[0170] To be counted as a ‘protoplast’, the object detected and measured by the Cytation5™ had to 1) to fluoresce red, 2) be between 20-150 μm and 3) have a circularity value equal to or greater than 0.49 (with a rolling ball diameter of 300 μm). For each protoplast, the green fluorescent signal datapoint (emanating from ZsGreen) was divided by its corresponding red fluorescent datapoint (emanating from TagRFP) to normalize for transfection efficiency, and the geometric mean (mean) and standard error of the mean (SEM) was calculated for each vector. The data are reported in “Relative Fluorescent Units” (RFU). An active element is defined as any RFU 4-fold or greater over the background control.

[0171] One construct, EE2889, corresponding to the JERECRESTR cis-acting regulatory element (SEQ ID NO:9), exhibited enhanced activity as a modulating element as a chimeric regulatory element (FIG. 1). This cis-acting regulatory element drove robust expression of the fluorescent coding sequence. The remainder of the elements did not show activity, even marginally, demonstrating that not all elements listed in the PLACE database can be used as modulating elements by merely placing them in the regulatory element (for example a promoter regulatory element) of a gene. As such, the JERECRESTR cis-acting regulatory element (SEQ ID NO:9) was exemplified for the first time as a cis-acting regulatory element capable of functioning as a modulating element within a chimeric regulatory element to drive expression of a coding sequence.

### Example 6: Identification of Additional Cis-Acting Regulatory Elements That Increase Expression of a Coding Sequence

[0172] Cis-acting regulatory elements were obtained from the annotated, full-length transcriptional promoters of the figwort mosaic virus (FMV; Sanger, M., Daubert, S. and Goodman, R. M. 1990. Characteristics of a strong promoter from figwort mosaic virus: comparison with the analogous 35S promoter from cauliflower mosaic virus and the regulated mannopine synthase promoter. Plant Mol Biol. 14:433-443.) and the mirabilis mosaic virus (MMV; Dey, N. and Maiti, I. B. 1999. Structure and promoter/leader deletion analysis of mirabilis virus (MMV) full-length transcription promoter in transgenic plants. Plant Mol Biol. 40:771-782.). The cis-acting regulatory elements that were obtained are listed as SEQ ID NO:25 and SEQ ID NO:35 and provided in Tables 2 and 3. Variants of SEQ ID NO:25 were developed and are further provided in Table 2 as SEQ ID NO:26-34. A sequence alignment of SEQ ID NO:25-34 is provided as FIG. 2. Likewise, variants of SEQ ID NO:35 were developed and are further provided in Table 3 as SEQ ID NO:36-38. A sequence alignment of SEQ ID NO:36-38 is provided as FIG. 3. These regulatory elements were engineered upstream of a regulatory element (for example a plant promoter) and used to produce standardized dicot protoplast testing vectors as described in Example 2 and 3. Finally, the cis-acting regulatory elements were tested in a soy hypocotyl protoplast assay as described in Example 4 to test the vectors to determine whether the cis-acting regulatory elements could enhance the expression of a downstream coding sequence operably linked to the chimeric cis-acting regulatory element and another regulatory element (for example a promoter regulatory element) to function as a chimeric regulatory element.

TABLE 2
Elements selected for testing from MMV as-1 and plant-derived variants.

| | | | SEQ | FIG. 4 | RFU | RFU |
|---|---|---|---|---|---|---|
| Element Name | Element Origin | Sequence | ID NO: | Label: | Mean | SEM |
| No element | N/A | N/A | N/A | EE1906 | 8.0 | 0.23 |
| as-1 (20 bp) | CaMV FLt PRO | TGACGTAAGGGATGACGCAC | SEQ ID NO: 25 | EE2899 | 115.8 | 6.05 |
| MMV as-1 | MMV Flt PRO | ATGACGTAAGCCATGACGTCT | SEQ ID NO: 26 | EE2896 | 125.3 | 1.10 |
| MMV as-1 | MMV Flt PRO | TGACGTAAGCCATGACGTCT | SEQ ID NO: 27 | EE2950 | 125.5 | 6.94 |
| (20 bp) | | | | | | |
| AH-MMVAS1-V1 | Arachis hypogaea | ATGACGTAAGCaATGACGTCT | SEQ ID NO: 28 | EE3051 | 125.1 | 5.42 |
| IT-MMVAS1-V1 | Ipomoea triloba | ATGACGTAAGCgATGACGTC | SEQ ID NO: 29 | EE3052 | 108.8 | 2.14 |
| OS-MMVAS1-V1 | Oryza sativa | ATGACGTcAGCCATGACGTC | SEQ ID NO: 30 | EE3053 | 99.8 | 3.64 |
| AA-MMVAS1-V1 | Arabis alpina | TGACGTAAGCCATGAaGTCT | SEQ ID NO: 31 | EE3054 | 47.4 | 5.55 |
| SP-MMVAS1-V1 | Solanum | ATGACGTAgGCCATGACGTC | SEQ ID | EE3055 | 95.4 | 0.48 |
| | pennellii | | NO: 32 | | | |
| SL-MMVAS1-V1 | Solanum | ATGACGTAAtCCATGACGT | SEQ ID | EE3056 | 98.2 | 1.25 |
| | lycopersicum | | NO: 33 | | | |
| ATu-MMVAS1- | Allium | TGACGTAAGgCATGACGTC | SEQ ID | EE3057 | 105.9 | 5.55 |
| V1 | turkestanicum | | NO: 34 | | | |

TABLE 3
Elements selected for testing from FMV as-1 and plant-derived variants.

| | | | SEQ | FIG. 5 | RFU | RFU |
|---|---|---|---|---|---|---|
| Element Name | Element Origin | Sequence | ID NO: | Label: | Mean | SEM |
| FMV DxS as-1 | FMV FLt PRO | TGACGAACGCAGTGACGA | SEQ ID NO: 35 | EE2774 | 53.8 | 0.1 |
| ZM-FMVAS1-V1 | Zea mays | cGACGAACGCAGTGACGA | SEQ ID NO: 36 | EE3008 | 17.2 | 1.3 |
| OS-FMVAS1-V1 | Oryza sativa | TGACGAACGCAGTGACGg | SEQ ID NO: 37 | EE3009 | 46.3 | 4.9 |
| GR-FMVAS1-V1 | Gossypium | TGACGAAaGCAGTGACGA | SEQ ID NO: 38 | EE3010 | 59.3 | 5.1 |
| | raimondii | | | | | |

[0173] The results of the expression profiling indicated that the MMV as-1 cis-acting regulatory element (SEQ ID NO:25) and the variants there of (SEQ ID NO:26-34), exhibited superior activity as a modulating element within a chimeric regulatory element (for example a cis-acting regulatory element and a promoter regulatory element) (FIG. 4). This cis-acting regulatory element drove robust expression of the fluorescent coding sequence. Although there was some level of variation in the expression of the fluorescent coding sequence as compared to SEQ ID NO:25, all of the variant sequences expressed higher than the CaMV 35S minimal promoter control. As such, the MMV as-1 cis-acting regulatory element (SEQ ID NO:25) and MMV as-1 plant-derived variant cis-acting regulatory element (SEQ ID NO:26-34) were exemplified for the first time as cis-acting regulatory elements capable of functioning as a modulating element within a chimeric regulatory element (for example a promoter and a cis-acting regulatory element) to drive expression of a coding sequence.

[0174] The results of the expression profiling indicated that the FMV as-1 cis-acting regulatory element (SEQ ID NO:35) and the variants there of (SEQ ID NO:36-38), exhibited enhanced activity as a modulating element within a chimeric regulatory element (FIG. 5). This cis-acting regulatory element drove robust expression of the fluorescent coding sequence. Although there was some level of variation in the expression of the fluorescent coding sequence as compared to SEQ ID NO:33, all of the variant sequences expressed higher than the CaMV 35S minimal promoter control. As such, the FMV as-1 cis-acting regulatory element (SEQ ID NO:35) and FMV as-1 plant-derived variant cis-acting regulatory element (SEQ ID NO:36-38) were exemplified for the first time as cis-acting regulatory elements capable of functioning as a modulating element within a chimeric regulatory element (for example a promoter and a cis-acting regulatory element) to drive expression of a coding sequence.

### Example 7: Bioinformatic Based Analysis of Expression Elements to Identify Putative Cis-Genic Expression Elements

[0175] Variants for public EME motifs identified (MMV, GVBAV, CSVMV, MMV-1, GM-PSGS3AF1-V3 and JERECRSTR) were scanned in multiple genomes of interest including Zea mays (various genotypes derived form internal pan-genome study were explored A63, CSB8V, ED85E, EDE4N, EECPR, EEPAR, GH61, GR3KP, GR84Z, GRW2Z, HEF3D, HN4CN, HNH9H), Glycine max, Oryza sativa, Sorghum bicolor, Brassica napus. Genome sequences for these were downloaded from internal GAIA repository, NCBI and/or EnsemblPlants.

[0176] Sequences obtained from public EMEs motifs were first converted into a position weight matrix (PWM) representing probability of base at the specific position. Once the PWM was obtained for each EME sequence, these were then used to scan the whole genome using Find Individual Motif Occurrences (FIMO). The program computes a log-likelihood ratio score for each position in a given sequence database (whole genome sequences for crop of interest in our case), uses established dynamic programming methods (assuming a zero-order null model in which sequences are generated at random with user-specified per-letter background frequencies) to convert this score to a P-value and then applies false discovery rate analysis (using a bootstrap method proposed by Storey J D. A direct approach to false discovery rates. Journal of the Royal Statistical Society: Series B, 64:479-498, 2002.) to estimate a q-value for each position in the given sequence (Grant C E, Bailey T L, Noble W S. FIMO: Scanning for occurrences of a given motif. Bioinformatics, 27(7):1017-1018, 2011). Output was a ranked list of motif (EME) occurrences in the genome scanned, each with an associated log-likelihood ratio score, P-value and q-value. Top ranked variants were then used for subsequent characterization.

### Example 8: Identification of MMV-1 Soybean Variant Cis-Acting Regulatory Elements That Increase Expression of a Coding Sequence

[0177] Cis-acting regulatory elements were obtained by screening the MMV as-1 genetic element (SEQ ID NO:27) against plant genomic sequence databases (e.g., rice, soybean, canola, maize, and sorghum). The screening was completed via a FIMO algorithm from the MEME suite with a cap of the first 100 hits (redundant) (Charles E. Grant, Timothy L. Bailey, and William Stafford Noble, “FIMO: Scanning for occurrences of a given motif”, Bioinformatics, 27(7):1017-1018, 2011). This analysis of the plant genomic sequence database resulted in the identification of a large number or sequences that shared relatively high levels of sequence identity to the MMV as-1 genetic element. The pool of sequences was further culled to identify putative cis-acting regulatory elements for testing in planta. These sequences were sorted and selected based on predicted characteristics of active regulatory elements, which included, for example, the intact bZIP binding motifs (e.g., ‘ACGT’) and sequences that shared high levels of sequence identity to the parent element for testing.

[0178] The cis-acting regulatory elements that were obtained are listed as SEQ ID NO:508-SEQ ID NO:515 and provided in Table 4. A sequence alignment of 508-SEQ ID NO:515 is provided as FIG. 7. These regulatory elements were engineered upstream of a regulatory element (for example a plant promoter) and used to produce standardized dicot protoplast testing vectors as described in Example 2 and 3. The cis-acting regulatory elements were incorporated in duplicate within the construct. Those with skill in the art would appreciate that the cis-acting regulatory element could be include as a monomer, dimer, trimer, or in any copy number to drive robust expression of a coding sequence. Finally, the cis-acting regulatory elements were tested in a soy hypocotyl protoplast assay as described in Example 4 to test the vectors to determine whether the cis-acting regulatory elements could enhance the expression of a downstream coding sequence operably linked to the chimeric cis-acting regulatory element and another regulatory element (for example a promoter regulatory element) to function as a chimeric regulatory element.

TABLE 4
Elements selected for testing from MMV as-1 and plant-derived variants.

| Element | Element | | SEQ | FIG. 6 | Fold | Fold 95% | Fold 95% |
|---|---|---|---|---|---|---|---|
| Name | Origin | Sequence | ID NO: | Label: | Change | Lower CI | Upper CI |
| No Element | N/A | N/A | N/A | EE1906 | 1.0 | N/A | N/A |
| MMV as-1 | CaMV FLt PRO | TGACGTAAGCCATGACGTCT | SEQ ID | EE2950 | 12.6 | 11.5 | 13.7 |
| (20 bp) | | | NO: 27 | | | | |
| GM-MMVAS1- | Glycine max | TGACGTAAGCAAGGACGTCA | SEQ ID | EE3397 | 11.2 | 10.3 | 12.1 |
| V02 | | | NO: 508 | | | | |
| GM-MMVAS1- | Glycine max | AAACGTAATCCATGACGTCT | SEQ ID | EE3398 | 10.3 | 9.2 | 11.4 |
| V03 | | | NO: 509 | | | | |
| GM-MMVAS1- | Glycine max | TGACGTAAGCCACTACGTGC | SEQ ID | EE3399 | 4.6 | 4.2 | 5.0 |
| V04 | | | NO: 510 | | | | |
| GM-MMVAS1- | Glycine max | TGACGTATTCCATGACGTAT | SEQ ID | EE3400 | 11.6 | 10.7 | 12.7 |
| V05 | | | NO: 511 | | | | |
| GM-MMVAS1- | Glycine max | TTACGTAAGTCGTGACGTCT | SEQ ID | EE3526 | 11.4 | 10.6 | 12.3 |
| V06 | | | NO: 512 | | | | |
| GM-MMVAS1- | Glycine max | TGACGTAAGCAGAGACGTAT | SEQ ID | EE3527 | 8.3 | 7.7 | 8.9 |
| V07 | | | NO: 513 | | | | |
| GM-MMVAS1- | Glycine max | TTACGTTTGCCATTACGTCT | SEQ ID | EE3528 | 9.5 | 8.0 | 10.3 |
| V08 | | | NO: 514 | | | | |
| GM-MMVAS1- | Glycine max | TGACGTATGCTATTACGCCT | SEQ ID | EE3529 | 7.5 | 6.7 | 18.3 |
| V09 | | | NO: 515 | | | | |

[0179] The results of the expression profiling indicated that the MMV as-1 cis-acting regulatory element (SEQ ID NO:27) and the variants obtained from soybean (SEQ ID NO:508-515), exhibited activity as a modulating element within a chimeric regulatory element (for example a cis-acting regulatory element and a promoter regulatory element) (FIG. 6). This cis-acting regulatory element drove robust expression of the fluorescent coding sequence in soybean protoplasts. Those with skill in the art would appreciate that these cis-acting regulatory elements would also drive robust expression of a coding sequence in other plants. Although there was some level of variation in the expression of the fluorescent coding sequence as compared to SEQ ID NO:27, all of the variant sequences expressed higher than the CaMV 35S minimal promoter control. As such, the MMV as-1 cis-acting regulatory element (SEQ ID NO:27) and MMV as-1 plant-derived variant cis-acting regulatory element (SEQ ID NO:508-515) were exemplified for the first time as cis-acting regulatory elements capable of functioning as a modulating element within a chimeric regulatory element (for example a promoter and a cis-acting regulatory element) to drive expression of a coding sequence.

### Example 9: Identification of Synthetic MMV-1 Variant Cis-Acting Regulatory Elements and Synthetic G-Box Binding Motif Cis-Acting Regulatory Elements That Increase Expression of a Coding Sequence

[0180] Cis-acting regulatory elements were obtained by analyzing the MMV-1 promoter. Initially, 70 base pair fragments of the MMV-1 promoter were overlapped with one another to generate a consensus sequence. The sequences covered 360 base pairs of the MMV-1 promoter core, and the sequences overlapped by 35 base pairs. The resulting sequences were tested in planta to determine if any of the putative cis-acting regulatory elements could be used to robustly drive expression. One fragment demonstrated above background expression levels and was selected for further characterization. The region of activity was narrowed down to a 29 base pair element, and was named MMV-EMEI (SEQ ID NO:516). The identified MMV-EME1 sequence was used to obtain variant sequences from the maize, soy, canola, rice and sorghum genomes using bioinformatic analysis methods similar to those described in Example 7.

[0181] The cis-acting regulatory elements that were obtained are listed as SEQ ID NO:516-SEQ ID NO:525 and provided in Table 5. A sequence alignment of SEQ ID NO:516-SEQ ID NO:525 is provided as FIG. 9. These regulatory elements were engineered upstream of a regulatory element (for example a plant promoter) and used to produce standardized dicot protoplast testing vectors as described in Example 2 and 3. The cis-acting regulatory elements were incorporated in duplicate within the construct. Those with skill in the art would appreciate that the cis-acting regulatory element could be include as a monomer, dimer, trimer, or in any copy number to drive robust expression of a coding sequence. Finally, the cis-acting regulatory elements were tested in a soy hypocotyl protoplast assay as described in Example 4 to test the vectors to determine whether the cis-acting regulatory elements could enhance the expression of a downstream coding sequence operably linked to the chimeric cis-acting regulatory element and another regulatory element (for example a promoter regulatory element) to function as a chimeric regulatory element.

TABLE 5
Elements selected for testing.

| | | | | | | Fold | Fold |
|---|---|---|---|---|---|---|---|
| | | | | | | 95% | 95% |
| Element | Element | | SEQ | FIG. 8 | Fold | Lower | Upper |
| Name | Origin | Sequence | ID NO: | Label: | Change | CI | CI |
| No Element | N/A | N/A | N/A | EE1906 | 1.0 | N/A | N/A |
| MMV-EME1 | MMV FLt PRO | AAGATAAGATAATAATGTTGAAGATAAGA | SEQ ID | EE3132 | 6.8 | 0.7 | 0.7 |
| | | | NO: 516 | | | | |
| GM-MMV1-V01 | Glycine max | AAGATAAGATAAAAGATTTAAAGATAAGA | SEQ ID | EE3530 | 14.0 | 0.4 | 0.4 |
| | | | NO: 517 | | | | |
| GM-MMV1-V02 | Glycine max | AAGATAAGAGATTAAAGTAAAAGATAAGA | SEQ ID | EE3531 | 1.2 | 0.1 | 0.1 |
| | | | NO: 518 | | | | |
| GM-MMV1-V03 | Glycine max | AAGATAAGATAAAAAAGTAAAAGATAAGA | SEQ ID | EE3532 | 1.2 | 0.1 | 0.1 |
| | | | NO: 519 | | | | |
| GM-MMV1-V04 | Glycine max | AAGATAAGAAAGTAAAAGATAAGA | SEQ ID | EE3533 | 1.3 | 0.1 | 0.1 |
| | | | NO: 520 | | | | |
| GM-MMV1-V05 | Glycine max | ATGAGATGATATTAATGTTGATGATAATGT | SEQ ID | EE3537 | 1.3 | 0.1 | 0.1 |
| | | TGAGA | NO: 521 | | | | |
| GM-MMV1-V06 | Glycine max | AAGAAAAAATAATAAGAATGCAAAGAAGA | SEQ ID | EE3538 | 1.3 | 0.1 | 0.1 |
| | | GTAGGA | NO: 522 | | | | |
| SY-MMV1-V01 | Sythethic | AAGATAAGATAATAATGATGAAGATAAGA | SEQ ID | EE3535 | 3.1 | 10.3 | 0.4 |
| | | | NO:523 | | | | |
| SY-MMV1-V02 | Synthetic | AAGATAAGATAATAATGATAAAGATAAGA | SEQ ID | EE3534 | 5.3 | 0.5 | 0.6 |
| | | | NO: 524 | | | | |
| SY-MMV1-V03 | Synthetic | AAGATAAGATAATAATGTAGAAGATAAGA | SEQ ID | EE3536 | 2.9 | 0.3 | 0.3 |
| | | | NO: 525 | | | | |

[0182] The results of the expression profiling indicated that the MMV-EMEI cis-acting regulatory element (SEQ ID NO:516) and a number of the other variants (SEQ ID NO:517, and SEQ ID NO:523-525), exhibited activity as a modulating element within a chimeric regulatory element (for example a cis-acting regulatory element and a promoter regulatory element) (FIG. 8). This cis-acting regulatory element drove robust expression of the fluorescent coding sequence in soybean protoplasts. Those with skill in the art would appreciate that these cis-acting regulatory elements would also drive robust expression of a coding sequence in other plants. Although there was some level of variation in the expression of the fluorescent coding sequence as compared to SEQ ID NO:516, all of the variant sequences expressed higher than the CaMV 35S minimal promoter control. As such, the MMV-EMEI cis-acting regulatory element (SEQ ID NO:516) and a number of the other variants (SEQ ID NO:517, and SEQ ID NO:523-525) were exemplified for the first time as cis-acting regulatory elements capable of functioning as a modulating element within a chimeric regulatory element (for example a promoter and a cis-acting regulatory element) to drive expression of a coding sequence.

### Example 10: Identification of PS-GS3A Variant Cis-Acting Regulatory Elements That Increase Expression of a Coding Sequence

[0183] Cis-acting regulatory elements were obtained by analyzing the regulatory elements of PS-GS3A that was obtained from the pea glutamine synthetase GS3A promoter (Brears, T., Walker, E. L., Coruzzi, G. M. A promoter sequence involved in cell-specific expression of the pea gluamine syntetas GS3A gene in organs of transgenic tobacco and alfalfa. Plant J. 1(2) 235-244). Cis-acting regulatory elements were obtained by screening the PS-GS3A genetic element (SEQ ID NO:526) against plant genomic sequence databases from soybean. using bioinformatic analysis methods similar to those described in Example 7. This analysis of the plant genomic sequence database resulted in the identification of a large number or sequences that shared relatively high levels of sequence identity to the MMV as-1 genetic element. The pool of sequences was further culled to identify putative cis-acting regulatory elements for testing in planta. These sequences were sorted and selected based on predicted characteristics of active regulatory elements, which included, for example, the intact bZIP binding motifs (e.g., ‘ACGT’) and sequences that shared high levels of sequence identity to the parent element for testing. The identified sequences were tested in planta to determine if any of the putative cis-acting regulatory elements could be used to robustly drive expression.

[0184] The cis-acting regulatory elements that were obtained are listed as SEQ ID NO:526-SEQ ID NO:531 and provided in Table 6. A sequence alignment of SEQ ID NO:526-SEQ ID NO:531 is provided as FIG. 11. These regulatory elements were engineered upstream of a regulatory element (for example a plant promoter) and used to produce standardized dicot protoplast testing vectors as described in Example 2 and 3. The cis-acting regulatory elements were incorporated in duplicate within the construct. Those with skill in the art would appreciate that the cis-acting regulatory element could be include as a monomer, dimer, trimer, or in any copy number to drive robust expression of a coding sequence. Finally, the cis-acting regulatory elements were tested in a soy hypocotyl protoplast assay as described in Example 4 to test the vectors to determine whether the cis-acting regulatory elements could enhance the expression of a downstream coding sequence operably linked to the chimeric cis-acting regulatory element and another regulatory element (for example a promoter regulatory element) to function as a chimeric regulatory element.

TABLE 6
Elements selected for testing.

| | | | | | | Fold | Fold |
|---|---|---|---|---|---|---|---|
| | | | | | | 95% | 95% |
| Element | Element | | SEQ | FIG. 10 | Fold | Lower | Upper |
| Name | Origin | Sequence | ID NO: | Label: | Change | CI | CI |
| No Element | N/A | N/A | N/A | EE1906 | 1.0 | N/A | N/A |
| PS-GS3A-F1 | Pisum | TTGATCTAGTAGATAAA | SEQ ID NO: 526 | EE2645 | 3.0 | 2.5 | 3.5 |
| | sativum | | | | | | |
| GM-PSGS3AF1- | Glycine | TTGATCTAGTATATAAA | SEQ ID NO: 527 | EE2646 | 1.3 | 1.1 | 1.5 |
| V1 | max | | | | | | |
| GM-PSGS3AF1- | Glycine | TTGATCTAGTAGTTAAA | SEQ ID NO: 528 | EE2647 | 1.5 | 1.2 | 1.9 |
| V2 | max | | | | | | |
| GM-PSGS3AF1- | Glycine | GTGATCTACTAGATAAA | SEQ ID NO: 529 | EE2648 | 3.5 | 3.0 | 4.1 |
| V3 | max | | | | | | |
| GM-PSGS3AF1- | Glycine | TTGATGTAGTAGATAAT | SEQ ID NO: 530 | EE2649 | 1.4 | 1.3 | 1.6 |
| V4 | max | | | | | | |
| GM-PSGS3AF1- | Glycine | ATGATCTAGAAGATAAA | SEQ ID NO: 531 | EE2650 | 1.9 | 1.7 | 2.2 |
| V5 | max | | | | | | |

[0185] The results of the expression profiling indicated that the PS-GS3A-F1 cis-acting regulatory element (SEQ ID NO:526) and a number of the soybean variants (SEQ ID NO:527-531), exhibited activity as a modulating element within a chimeric regulatory element (for example a cis-acting regulatory element and a promoter regulatory element) (FIG. 10). This cis-acting regulatory element drove robust expression of the fluorescent coding sequence in soybean protoplasts. Those with skill in the art would appreciate that these cis-acting regulatory elements would also drive robust expression of a coding sequence in other plants. Although there was some level of variation in the expression of the fluorescent coding sequence as compared to the PS-GS3A-F1 cis-acting regulatory element (SEQ ID NO:526), all of the variant sequences expressed higher than SEQ ID NO:526. As such, the soybean variants (SEQ ID NO:517, and SEQ ID NO:527-531) were exemplified for the first time as cis-acting regulatory elements capable of functioning as a modulating element within a chimeric regulatory element (for example a promoter and a cis-acting regulatory element) to drive expression of a coding sequence.

### Example 11: Identification of Cis-Acting Regulatory Elements That Increase Expression of a Coding Sequence From Virus

[0186] Cis-acting regulatory elements were obtained by screening the CaMV as-1 genetic element against viral genomic sequence databases using bioinformatic analysis methods similar to those described in Example 7. This analysis of the plant genomic sequence database resulted in the identification of a large number or sequences that shared relatively high levels of sequence identity to the CaMV as-1 genetic element. The pool of sequences was further culled to identify putative cis-acting regulatory elements for testing in planta.

[0187] The cis-acting regulatory elements that were obtained are listed as SEQ ID NO:532-SEQ ID NO:550 and provided in Table 7. A sequence alignment of SEQ ID NO:526-SEQ ID NO:531 is provided as FIG. 13. These regulatory elements were engineered upstream of a regulatory element (for example a plant promoter) and used to produce standardized monocot protoplast testing vectors as described in Example 2 and 3, where the monocot promoter (Zea mays GOS2 promoter) was incorporated into construct design to drive expression in Zea mays protoplasts. The cis-acting regulatory elements were incorporated in duplicate within the construct. Those with skill in the art would appreciate that the cis-acting regulatory element could be include as a monomer, dimer, trimer, or in any copy number to drive robust expression of a coding sequence. Finally, the cis-acting regulatory elements were tested in a transient gene expression Zea mays leaf mesophyll protoplast platform as described in Examples 1 and 3 of patent application WO2018183878A1. The analysis was completed to test the vectors to determine whether the cis-acting regulatory elements could enhance the expression of a downstream coding sequence operably linked to the chimeric cis-acting regulatory element and another regulatory element (for example a promoter regulatory element) to function as a chimeric regulatory element.

TABLE 7
Elements selected for testing.

| | | | | | | Fold | Fold |
|---|---|---|---|---|---|---|---|
| | | | | | | 95% | 95% |
| Element | | | SEQ | FIG. 12 | Fold | Lower | Upper |
| Name | Element Origin | Sequence | ID NO: | Label: | Change | CI | CI |
| No Element | N/A | N/A | N/A | EE1619 | 1.0 | N/A | N/A |
| MMV as-1 | MMV FLt PRO | TGACGTAAGCCATGACGTCT | SEQ ID | EE3266 | 9.6 | 9.1 | 10.0 |
| (20 bp) | | | NO: 27 | | | | |
| AH-MMVAS1- | Arachis hypogaea | ATGACGTAAGCAATGACGTCT | SEQ ID | EE3267 | 8.2 | 7.7 | 8.7 |
| V1 | | | NO: 28 | | | | |
| OS-MMVAS1- | Oryza sativa | ATGACGTCAGCCATGACGTC | SEQ ID | EE3268 | 7.2 | 6.7 | 7.7 |
| V1 | | | NO: 30 | | | | |
| SL-MMVAS1- | Solanum | ATGACGTAATCCATGACGT | SEQ ID | EE3269 | 8.1 | 7.7 | 8.6 |
| V1 | lycopersicum | | NO: 33 | | | | |
| FMV DXS as-1 | FMV FLt PRO | TGACGAACGCAGTGACGA | SEQ ID | EE3386 | 4.5 | 4.3 | 4.8 |
| | | | NO: 35 | | | | |
| OS-FMVAS1- | Oryza sativa | TGACGAACGCAGTGACGG | SEQ ID | EE3272 | 5.5 | 5.1 | 5.9 |
| V1 | | | NO: 37 | | | | |
| GR-FMVAS1- | Gossypium | TGACGAAAGCAGTGACGA | SEQ ID | EE3273 | 7.2 | 6.8 | 7.6 |
| V1 | raimondii | | NO: 38 | | | | |
| ABV EME1 | Aglaonema | TGAAGAAAACCCTTATGTGG | SEQ ID | EE3135 | 1.3 | 1.2 | 1.4 |
| | bacilliform virus | | NO: 532 | | | | |
| ABV EME2 | Aglaonema | TACGTAAACTCCTAAGCCGT | SEQ ID | EE3136 | 1.4 | 1.3 | 1.5 |
| | bacilliform virus | | NO: 533 | | | | |
| BCVBV EME1 | Bougianvillea | TGACGGATGCAATGACGTCA | SEQ ID | EE3137 | 8.3 | 7.9 | 8.7 |
| | chlorotic vein | | NO: 534 | | | | |
| | banding virus | | | | | | |
| ComYMV | Commelina yellow | TGATGATGTCATTGATGACGGCG | SEQ ID | EE3138 | 6.2 | 5.9 | 6.6 |
| EME1 | mottle virus | | NO: 535 | | | | |
| GVBAV EME1 | Gooseberry vein | TGATTCGTCATCGCTTACGCCA | SEQ ID | EE3139 | 8.4 | 7.9 | 8.8 |
| | banding | | NO: 536 | | | | |
| | associated virus | | | | | | |
| GVCV EME1 | Grapevine | TGACGTAAGCAATGACGACT | SEQ ID | EE3140 | 9.5 | 9.1 | 9.9 |
| | clearning virus | | NO: 537 | | | | |
| DMV EME1 | Dahlia mosaic | AGACGTCAGCAGTGACGAAC | SEQ ID | EE3141 | 8.5 | 8.2 | 9.0 |
| | virus | | NO: 538 | | | | |
| DMV EME2 | Dahlia mosaic | AAACGTCAGCAATGACGTCA | SEQ ID | EE3142 | 9.1 | 8.7 | 9.5 |
| | Virus | | NO: 539 | | | | |
| EVCV EME1 | Eupatorium vein- | AAACGTCATCCATGACGTTT | SEQ ID | EE3143 | 7.9 | 7.5 | 8.3 |
| | clearing virus | | NO: 540 | | | | |
| RuFDV EME1 | Rudbeckia flower | AGACGTAAGCCATGACGTCA | SEQ ID | EE3144 | 8.8 | 8.3 | 9.4 |
| | distortion virus | | NO: 541 | | | | |
| SVBV EME1 | Strawberry vein | TGAAGATAAGACTGACCCCA | SEQ ID | EE3145 | 1.9 | 1.8 | 2.0 |
| | banding virus | | NO: 542 | | | | |
| CsVMV EME1 | Cassava vein | TGAAGACGTAAGCACTGACGACA | SEQ ID | EE3146 | 7.5 | 7.1 | 7.8 |
| | mosaic virus | | NO: 543 | | | | |
| SPCOV EME1 | Sweet potato | TGACGCAGGCGATGACGTCA | SEQ ID | EE3147 | 8.0 | 7.6 | 8.4 |
| | collusive virus | | NO: 544 | | | | |
| PVCV EME1 | Petunia vein | TGATGTAAGTGCTTACGTCT | SEQ ID | EE3148 | 7.8 | 7.4 | 8.2 |
| | clearing virus | | NO: 545 | | | | |
| BRRV EME1 | Blueberry red | TGACGTAAGTTTACACTTCG | SEQ ID | EE3149 | 0.9 | 0.9 | 1.0 |
| | ringspot virus | | NO: 546 | | | | |
| CmYLCV | Cestrum yellow | TGACGTAAGGGCTTACGAAA | SEQ ID | EE3150 | 8.2 | 7.8 | 8.7 |
| EME1 | leaf curling virus | | NO: 547 | | | | |
| PCSV EME1 | Peanut chlorotic | TGACGTAAGGGCTTACGCCA | SEQ ID | EE3151 | 8.0 | 7.7 | 8.4 |
| | streak virus | | NO: 548 | | | | |
| SbCMV EME1 | Soybean chlorotic | TGAACGTCAGCAATGACGAA | SEQ ID | EE3152 | 7.6 | 7.1 | 8.0 |
| | mottle virus | | NO: 549 | | | | |
| WCSV-1 EME1 | Water chestnut | TGGAGAGGAATCAGCCCGTGACGAC | SEQ ID | EE3153 | 1.2 | 1.1 | 1.3 |
| | soymovirus 1 | | NO: 550 | | | | |

[0188] The results of the expression profiling indicated that the CaMV as-1 variants (SEQ ID NO:532-550), exhibited activity as a modulating element within a chimeric regulatory element (for example a cis-acting regulatory element and a promoter regulatory element) (FIG. 12). This cis-acting regulatory element drove robust expression of the fluorescent coding sequence. Likewise, the plant FMV and MMV-1 variants (SEQ ID NO:28-33 and SEQ ID NO:37-38) exhibited activity as a modulating element within a chimeric regulatory element (for example a cis-acting regulatory element and a promoter regulatory element) within maize protoplasts (FIG. 12). Those with skill in the art would appreciate that these cis-acting regulatory elements would also drive robust expression of a coding sequence in other plants. As such, SEQ ID NO:532-550, SEQ ID NO:28-33 and SEQ ID NO:37-38 were exemplified for the first time as cis-acting regulatory elements capable of functioning as a modulating element within a chimeric regulatory element (for example a promoter and a cis-acting regulatory element) to drive expression of a coding sequence.

### Example 12: Identification of Cis-Acting Regulatory Elements That Increase Expression of a Coding Sequence From the PLACE Database

[0189] Cis-acting regulatory elements were obtained by screening the PLACE database as previously described in Example 1. This analysis of the plant genomic sequence database resulted in the identification of a large number or sequences to be tested in maize protoplasts. The pool of sequences was further culled to identify putative cis-acting regulatory elements for testing in planta.

[0190] The cis-acting regulatory elements that were obtained are listed as SEQ ID NO:551-SEQ ID NO:583 and provided in Table 8. A sequence alignment of SEQ ID NO:551-SEQ ID NO:583 is provided as FIG. 15. These regulatory elements, and SEQ ID NO:2-5, and SEQ ID NO:8-10, were engineered upstream of a regulatory element (for example a plant promoter) and used to produce standardized monocot protoplast testing vectors as described in Example 2 and 3, where the monocot promoter (Zea mays GOS2 promoter) was incorporated into construct design to drive expression in Zea mays protoplasts. The cis-acting regulatory elements were incorporated in duplicate within the construct. Those with skill in the art would appreciate that the cis-acting regulatory element could be include as a monomer, dimer, trimer, or in any copy number to drive robust expression of a coding sequence. Finally, the cis-acting regulatory elements were tested in a transient gene expression Zea mays leaf mesophyll protoplast platform as described in Examples 1 and 3 of patent application WO2018183878A1. The analysis was completed to test the vectors to determine whether the cis-acting regulatory elements could enhance the expression of a downstream coding sequence operably linked to the chimeric cis-acting regulatory element and another regulatory element (for example a promoter regulatory element) to function as a chimeric regulatory element.

TABLE 8
Elements selected for testing.

| | | | | | | Fold | Fold |
|---|---|---|---|---|---|---|---|
| | Database | | | FIG. | | 95% | 95% |
| | Entry | | SEQ ID | 14 | Fold | Lower | Upper |
| Element Name | Number | Sequence | NO: | Label: | Change | CI | CI |
| No element | N/A | N/A | N/A | EE1619 | 1 | N/A | N/A |
| 23BPUASNSCYCB1 | S000283 | TTTATTTACCAAACGGTAACATC | SEQ ID | EE3174 | 0.85 | 0.82 | 0.89 |
| | | | NO: 551 | | | | |
| 23BPZM27KDAZEIN | S000341 | GACGTGTAAAGTAAATTTACAAC | SEQ ID | EE3175 | 0.89 | 10.86 | 0.92 |
| | | | NO: 552 | | | | |
| 3AF1BOXPSRBCS3 | S000004 | AAATAGATAAATAAAAACATT | SEQ ID | EE3172 | 0.28 | 0.24 | 0.32 |
| | | | NO: 553 | | | | |
| AGTACSAO | S000258 | AAAAAGTAAAAAGTAAAAAAGTAAAAAG | SEQ ID | EE3180 | 0.94 | 0.90 | 0.97 |
| | | | NO: 554 | | | | |
| ALFINTPARC | S000238 | TTACGCAAGCAATGACA | SEQ ID | EE3160 | 3.84 | 3.68 | 4.01 |
| | | | NO: 555 | | | | |
| ANAEROBICCISZMGAPC4 | S000350 | CGAAACCAGCAACGGTCCAG | SEQ ID | EE3389 | 0.83 | 0.79 | 0.88 |
| | | | NO: 3 | | | | |
| ARELIKEGHPGDFR2 | S000437 | AGTTGAATGGGGGTGCA | SEQ ID | EE3161 | 1.01 | 0.97 | 1.05 |
| | | | NO: 556 | | | | |
| ATRICHPSPETE | S000248 | AATATACTAGTATTATTTACTAAAAAAA | SEQ ID | EE3182 | 1.04 | 1.00 | 1.08 |
| | | ATC | NO: 557 | | | | |
| BOXC'PSAS1 | S000227 | TCCCGGTACACACTTCTT | SEQ ID | EE3164 | 0.86 | 0.83 | 0.89 |
| | | | NO: 558 | | | | |
| BOXINTPATPB | S000295 | AATTCCATAGAATAGATAATA | SEQ ID | EE3173 | 1.03 | 1.00 | 1.07 |
| | | | NO: 559 | | | | |
| CIGMAUX28 | S000326 | TGAAAACAGTGAGTTA | SEQ ID | EE3154 | 0.57 | 0.54 | 0.60 |
| | | | NO: 560 | | | | |
| CARG1ATAP3 | S000347 | GTTTACATAAATGGAAAA | SEQ ID | EE3387 | 0.80 | 0.75 | 0.86 |
| | | | NO: 561 | | | | |
| CARG2ATAP3 | S000348 | CTTACCTTTCATGGATTA | SEQ ID | EE3165 | 0.76 | 0.74 | 0.79 |
| | | | NO: 562 | | | | |
| CARG3ATAP3 | S000349 | CTTTCCATTTTTAGTAAC | SEQ ID | EE3166 | 0.90 | 0.87 | 0.93 |
| | | | NO: 563 | | | | |
| CGFIATCAB2 | S000213 | GATAAAGATTACTTCAGATATAACAAA | SEQ ID | EE3184 | 0.75 | 0.72 | 0.78 |
| | | CGTTAC | NO: 564 | | | | |
| CGTGTSPHZMC1 | S000294 | CGTGTCGTCCATGCAT | SEQ ID | EE3155 | 0.34 | 0.32 | 0.36 |
| | | | NO: 565 | | | | |
| EIN3ATERF1 | S000332 | GGATTCAAGGGGCATGTATCTTGAATCC | SEQ ID | EE3181 | 0.95 | 0.91 | 0.99 |
| | | | NO: 566 | | | | |
| ELEMENT1GMLBC3 | S000319 | GATATATTAATATTTTATTTTATA | SEQ ID | EE3392 | 1.05 | 0.99 | 1.11 |
| | | | NO: 567 | | | | |
| ELEMENT2GMLBC3 | S000320 | CTTAAATTATTTATTT | SEQ ID | EE3156 | 0.85 | 0.82 | 0.89 |
| | | | NO: 568 | | | | |
| ELREIPCPALI | S000306 | CTCCAACAAACCCCTTC | SEQ ID | EE3162 | 10.86 | 0.83 | 0.89 |
| | | | NO: 569 | | | | |
| GAREHVAMY1 | S000038 | GGCCGATAACAAACTCCGGCC | SEQ ID | EE3390 | \|0.59 | 0.56 | 0.63 |
| | | | NO: 4 | | | | |
| GLUTEBOX10SGT2 | S000046 | ATATCATGAGTCACTTCA | SEQ ID | EE3167 | 0.79 | 0.77 | 0.82 |
| | | | NO: 570 | | | | |
| GLUTEBOX1OSGT3 | S000128 | TATCTAGTGAGTCACTTCA | SEQ ID | EE3388 | \|0.73 | 0.68 | 0.78 |
| | | | NO: 2 | | | | |
| GLUTEBP2OS | S000049 | ATGCTCAATAGATATAAGT | SEQ ID | EE3169 | 0.81 | 0.78 | 0.84 |
| | | | NO: 571 | | | | |
| GREGIONNTPRB1B | S000364 | TGGCGGCTCTTATCTCACGTGATG | SEQ ID | EE3393 | 1.29 | 1.22 | 1.36 |
| | | | NO: 8 | | | | |
| IDEIHVIDS2 | S000463 | ATCAAGCATGCTTCTTGC | SEQ ID | EE3168 | 0.61 | 0.59 | 0.64 |
| | | | NO: 572 | | | | |
| IDE2HVIDS2 | S000464 | TTGAACGGCAAGTTTCACGCTGTCACT | SEQ ID | EE3179 | 0.57 | 0.53 | 0.60 |
| | | | NO: 573 | | | | |
| JERECRSTR | S000384 | CTCTTAGACCGCCTTCTTTGAAAG | SEQ ID | EE3271 | 2.02 | 1.89 | 2.15 |
| | | | NO: 9 | | | | |
| PE1ASPHYA3 | S000196 | GAAATAGCAAATGTTAAAAATA | SEQ ID | EE3391 | 0.68 | 0.64 | 0.72 |
| | | | NO: 5 | | | | |
| PE3ASPHYA3 | S000197 | CAGCTCCCATGGCTCTCCCATCCGCGCC | SEQ ID | EE3183 | 0.77 | 0.74 | 0.81 |
| | | GGT | NO: 574 | | | | |
| PIIATGAPB | S000382 | TTGGTTTTGATCAAAACCAA | SEQ ID | EE3170 | 0.27 | 0.23 | 0.31 |
| | | | NO: 575 | | | | |
| REGIONIOSOSEM | S000300 | CGGCGGCCTCGCCACG | SEQ ID | EE3157 | 0.85 | 0.82 | 0.88 |
| | | | NO: 576 | | | | |
| RSEPVGRP18 | S000289 | CATCCAACTTTCATATCCATGTGCTT | SEQ ID | EE3177 | 0.77 | 0.72 | 0.82 |
| | | | NO: 577 | | | | |
| RSRBNEXTA | S000243 | CAAACTCGTATATCCAT | SEQ ID | EE3163 | 0.66 | 10.62 | 0.70 |
| | | | NO: 578 | | | | |
| SBINPABC1 | S000435 | CACTAACACAAAGTAA | SEQ ID | EE3158 | 0.68 | 10.65 | 0.70 |
| | | | NO: 579 | | | | |
| SEIPVGRP18 | S000288 | ATAATGGGCCACACTGTGGGGCAT | SEQ ID | EE3394 | 0.93 | 0.87 | 0.99 |
| | | | NO: 10 | | | | |
| TEF1BOXATA1 | S000311 | ACAGGGGCATAATGGTAATTTAAA | SEQ ID | EE3176 | 1.46 | 1.40 | 1.52 |
| | | | NO: 580 | | | | |
| TEFBOXATEEF1AA1 | S000311 | AGGGGCATAATGGTAA | SEQ ID | EE3159 | 1.47 | 1.42 | 1.52 |
| | | | NO: 581 | | | | |
| WARBNEXTA | S000241 | GTACGTGTTATAAAACGTGT | SEQ ID | EE3171 | 0.81 | 0.78 | 0.84 |
| | | | NO: 582 | | | | |
| YREGIONNTPRB1B | S000365 | TGTGACATTGAAATTCTTTGACTTTA | SEQ ID | EE3178 | 1.02 | 0.98 | 1.06 |
| | | | NO: 583 | | | | |

[0191] The results of the expression profiling indicated that the SEQ ID NO:551-SEQ ID NO:583 exhibited activity as a modulating element within a chimeric regulatory element (for example a cis-acting regulatory element and a promoter regulatory element) (FIG. 14). The cis-acting regulatory element drove robust expression of the fluorescent coding sequence in the maize protoplasts. Those with skill in the art would appreciate that these cis-acting regulatory elements would also drive robust expression of a coding sequence in other plants. As such, SEQ ID NO:551-583, SEQ ID NO:2-5 and SEQ ID NO:8-10 were exemplified for the first time as cis-acting regulatory elements capable of functioning as a modulating element within a chimeric regulatory element (for example a promoter and a cis-acting regulatory element) to drive expression of a coding sequence.

### Example 13: Identification of Cis-Acting Regulatory Elements That Increase Expression of a Coding Sequence Within Maize Protoplasts

[0192] The GM-PSGS3AF1-V3 (SEQ ID NO:529) and the MMV-EME1 (SEQ ID NO:516) regulatory elements from Example 9 are cis-acting regulatory elements that were further screened in maize protoplasts and are listed in Table 9. An alignment of the sequences is provided in FIG. 17. Each regulatory element was engineered upstream of a regulatory element (for example a plant promoter) and used to produce standardized monocot protoplast testing vectors as described in Example 2 and 3, where the monocot promoter (Zea mays GOS2 promoter) was incorporated into construct design to drive expression in Zea mays protoplasts. The cis-acting regulatory elements were incorporated in duplicate within the construct. Those with skill in the art would appreciate that the cis-acting regulatory element could be include as a monomer, dimer, trimer, or in any copy number to drive robust expression of a coding sequence. Finally, the cis-acting regulatory elements were tested in a transient gene expression Zea mays leaf mesophyll protoplast platform as described in Examples 1 and 3 of patent application WO2018183878A1. The analysis was completed to test the vectors to determine whether the cis-acting regulatory elements could enhance the expression of a downstream coding sequence operably linked to the chimeric cis-acting regulatory element and another regulatory element (for example a promoter regulatory element) to function as a chimeric regulatory element.

TABLE 9
Elements selected for testing.

| | | | | | | Fold | Fold |
|---|---|---|---|---|---|---|---|
| | | | | | | 95% | 95% |
| Element | Element | | SEQ ID | FIG. 16 | | Lower | Upper |
| Name | Origin | Sequence | NO: | Label: | Fold | CI | CI |
| No Element | N/A | N/A | N/A | EE1619 | 1 | 0 | 0 |
| MMV-EME1 | MMV FLt PRO | AAGATAAGATAATAATGTTGAAGATAAGA | 516 | EE3270 | 1.2 | 1.1 | 1.3 |
| GM- | Glycine max | GTGATCTACTAGATAAA | 529 | EE3274 | 0.9 | 0.9 | 1.0 |
| PSGS3AF1-V3 | | | | | | | |

[0193] The results of the expression profiling indicated that the SEQ ID NO:516 and SEQ ID NO:529 cis-acting regulatory elements exhibited activity as a modulating element within a chimeric regulatory element (for example a cis-acting regulatory element and a promoter regulatory element) (FIG. 16). The cis-acting regulatory element drove robust expression of the fluorescent coding sequence in the maize protoplasts. Those with skill in the art would appreciate that these cis-acting regulatory elements would also drive robust expression of a coding sequence in other plants. As such, SEQ ID NO:516 and SEQ ID NO:529 were exemplified for the first time as cis-acting regulatory elements capable of functioning as a modulating element within a chimeric regulatory element (for example a promoter and a cis-acting regulatory element) to drive expression of a coding sequence.

### Example 14: Identification of Cis-Acting Regulatory Elements That Increase Expression of a Coding Sequence Within Maize Protoplasts

[0194] Cis-acting regulatory elements were obtained by screening the MMV as-1 genetic element (SEQ ID NO:25) was screened against plant genomic sequence databases (e.g., rice, soybean, canola, maize, and sorghum). The screening was completed via a FIMO algorithm from the MEME suite with a cap of the first 100 hits (redundant) (Charles E. Grant, Timothy L. Bailey, and William Stafford Noble, “FIMO: Scanning for occurrences of a given motif”, Bioinformatics, 27(7):1017-1018, 2011). This analysis of the plant genomic sequence database resulted in the identification of a large number or sequences that shared relatively high levels of sequence identity to the MMV as-1 genetic element. The pool of sequences was further culled to identify putative cis-acting regulatory elements for testing in planta. These sequences were sorted and selected based on predicted characteristics of active regulatory elements, which included, for example, the intact bZIP binding motifs (e.g., ‘ACGT’) and sequences that shared high levels of sequence identity to the parent element for testing.

[0195] The cis-acting regulatory elements that were obtained are listed as SEQ ID NO:585-SEQ ID NO:601 and provided in Table 10. A sequence alignment of SEQ ID NO:585-SEQ ID NO:601 is provided as FIG. 19. Each cis-acting regulatory element was engineered upstream of a regulatory element (for example a plant promoter) and used to produce standardized monocot protoplast testing vectors as described in Example 2 and 3, where the monocot promoter (35S Minimal CAMV promoter of Yang, Y, Li, R and Qi, M. 2000. In vivo analysis of plant promoters and transcription factors by agroinfiltration of tobacco leaves. Plant J. 22(6):543-551) was incorporated into construct design to drive expression in Zea mays protoplasts. The cis-acting regulatory elements were incorporated in triplicate in the construct. Those with skill in the art would appreciate that the cis-acting regulatory element could be include as a monomer, dimer, trimer, or in any copy number to drive robust expression of a coding sequence. Finally, the cis-acting regulatory elements were tested in a transient gene expression Zea mays leaf mesophyll protoplast platform as described in Examples 1 and 3 of patent application WO2018183878A1. The analysis was completed to test the vectors to determine whether the cis-acting regulatory elements could enhance the expression of a downstream coding sequence operably linked to the chimeric cis-acting regulatory element and another regulatory element (for example a promoter regulatory element) to function as a chimeric regulatory element.

TABLE 10
Elements selected for testing.

| | | | | | | RFU | RFU |
|---|---|---|---|---|---|---|---|
| | | | | | | 95% | 95% |
| Element | Element | | SEQ | FIG. 18 | RFU | Lower | Upper |
| Name | Origin | Sequence | ID NO: | Label: | Mean | CI | CI |
| CaMV-as1 NI | Yang et al. | TGCTGTAAGGGATCTCGCAC | 584 | EE3549 | 2.1 | 2.1 | 2.1 |
| | 2000 | | | | | | |
| MMV as-1 | MMV FLt PRO | TGACGTAAGCCATGACGTCT | 27 | EE3550 | 173.8 | 170.2 | 177.6 |
| (20 bp) | | | | | | | |
| ZM-MMVAS1- | Zea mays | AGACGTAGGCCGTGACGTCG | 585 | EE3553 | 142.7 | 139.2 | 146.3 |
| V1 | | | | | | | |
| ZM-MMVAS1- | Zea mays | CGACGTAAGCCTCGACGTCC | 586 | EE3554 | 15.0 | 14.6 | 15.3 |
| V2 | | | | | | | |
| ZM-MMVAS1- | Zea mays | GGACGTAAGCCATATCGTCG | 587 | EE3555 | 1.9 | 1.8 | 1.9 |
| V3 | | | | | | | |
| ZM-MMVAS1- | Zea mays | TAACGTAAGACATGACGTGT | 588 | EE3556 | 104.9 | 102.5 | 107.3 |
| V4 | | | | | | | |
| ZM-MMVAS1- | Zea mays | TGACGTAAGCCACGCAGTCT | 589 | EE3557 | 3.7 | 3.6 | 3.8 |
| V5 | | | | | | | |
| ZM-MMVAS1- | Zea mays | TGACGTAAGCCACGCGGTCT | 590 | EE3558 | 1.8 | 1.7 | 1.8 |
| V6 | | | | | | | |
| ZM-MMVAS1- | Zea mays | TGACGTCACCCATGACGACA | 591 | EE3559 | 130.2 | 127.5 | 133.0 |
| V7 | | | | | | | |
| ZM-MMVAS1- | Zea mays | TGACGTCAGCACTGACGTCA | 592 | EE3560 | 175.2 | 171.8 | 178.7 |
| V8 | | | | | | | |
| ZM-MMVAS1- | Zea mays | TGACGTCAGCCATGGAGGCT | 593 | EE3561 | 1.1 | 1.0 | 1.1 |
| V9 | | | | | | | |
| ZM-MMVAS1- | Zea mays | TGACGTCAGCGATGACATCT | 594 | EE3562 | 219.9 | 215.8 | 224.1 |
| V10 | | | | | | | |
| ZM-MMVAS1- | Zea mays | TGACGTCTGCCATGGCGTCC | 595 | EE3564 | 1.4 | 1.4 | 1.5 |
| V12 | | | | | | | |
| ZM-MMVAS1- | Zea mays | TGACGTGAGCCATGTGGTCA | 596 | EE3565 | 1.1 | 1.1 | 1.1 |
| V13 | | | | | | | |
| ZM-MMVAS1- | Zea mays | TGACGTGAGTCATGAAGTCT | 597 | EE3566 | 1.2 | 1.2 | 1.2 |
| V14 | | | | | | | |
| ZM-MMVAS1- | Zea mays | TGACGTTGGCCATGTCGTCC | 598 | EE3567 | 1.0 | 1.0 | 1.0 |
| V15 | | | | | | | |
| ZM-MMVAS1- | Zea mays | TGAAGTCAGCCATGACGTCT | 599 | EE3568 | 150.3 | 147.1 | 153.6 |
| V16 | | | | | | | |
| ZM-MMVAS1- | Zea mays | GGAGGTAGGCCATGGCGTCT | 600 | EE3569 | 1.1 | 1.1 | 1.1 |
| V17 | | | | | | | |
| BN-MMVAS1- | Brassica napus | TGACGTACTCCATGACGTCT | 601 | EE3570 | 135.3 | 132.5 | 138.2 |
| V01 | | | | | | | |

[0196] The results of the expression profiling indicated that the MMV as-1 cis-acting regulatory element (SEQ ID NO:27) and the variants obtained from maize (SEQ ID NO:585-SEQ ID NO:601), exhibited activity as a modulating element within a chimeric regulatory element (for example a cis-acting regulatory element and a promoter regulatory element) (FIG. 18). This cis-acting regulatory element drove robust expression of the fluorescent coding sequence in maize protoplasts. Although there was some level of variation in the expression of the fluorescent coding sequence as compared to SEQ ID NO:27, many of the variant sequences expressed higher than the CaMV 35S minimal promoter control. As such, the MMV as-1 cis-acting regulatory element (SEQ ID NO:27) and MMV as-1 plant-derived variant cis-acting regulatory element (SEQ ID NO:585-601) were exemplified for the first time as cis-acting regulatory elements capable of functioning as a modulating element within a chimeric regulatory element (for example a promoter and a cis-acting regulatory element) to drive expression of a coding sequence.

### Example 15: Identification of Cis-Acting Regulatory Elements That Increase Expression of a Coding Sequence Within Maize Protoplasts

[0197] Cis-acting regulatory elements were obtained by screening the plant genomic sequence databases (e.g., rice, soybean, canola, maize, and sorghum). The cis-acting regulatory elements that were obtained are listed as SEQ ID NO:602-SEQ ID NO:634 and provided in Table 11. A sequence alignment of SEQ ID NO:602-SEQ ID NO:634 is provided as FIG. 21. Each cis-acting regulatory element was engineered upstream of a regulatory element (for example a plant promoter) and used to produce standardized monocot protoplast testing vectors as described in Example 2 and 3, where the monocot promoter (35S Minimal CAMV promoter) was incorporated into construct design to drive expression in Zea mays protoplasts. The cis-acting regulatory elements were incorporated in triplicate in the construct. Those with skill in the art would appreciate that the cis-acting regulatory element could be include as a monomer, dimer, trimer, or in any copy number to drive robust expression of a coding sequence. Finally, the cis-acting regulatory elements were tested in a transient gene expression Zea mays leaf mesophyll protoplast platform as described in Examples 1 and 3 of patent application WO2018183878A1. The analysis was completed to test the vectors to determine whether the cis-acting regulatory elements could enhance the expression of a downstream coding sequence operably linked to the chimeric cis-acting regulatory element and another regulatory element (for example a promoter regulatory element) to function as a chimeric regulatory element.

TABLE 11
Elements selected for testing.

| | | | | | | RFU 95% | RFU 95% |
|---|---|---|---|---|---|---|---|
| | | | SEQ ID | FIG. 20 | RFU | Lower | Upper |
| Element Name | Element Origin | Sequence | NO: | Label: | Mean | CI | CI |
| CaMV-as1_NI | Yang et al. | TGCTGTAAGGGATCTCGCAC | 584 | EE3549 | 1.9 | 1.9 | 1.9 |
| | 2000 | | | | | | |
| GVBAVAS1 | Gooseberry Vein | TGATTCGTCATCGCTTACGCCA | 602 | EE3551 | 135.5 | 3.6 | 3.7 |
| | Banding Virus | | | | | | |
| BN-GVBAVAS1- | Brassica napus | TGATGCATCATCGCTTATGCCA | 603 | EE3682 | 6.2 | 5.9 | 6.5 |
| V01 | | | | | | | |
| ZM-GVBAVAS1- | Zea mays | TGATCCGTCAACGCTAACGCCT | 604 | EE3683 | 2.2 | 2.2 | 2.3 |
| V01 | | | | | | | |
| ZM-GVBAVAS1- | Zea mays | TGATTCGTCGTCGCCGCCGCCA | 605 | EE3684 | 3.4 | 3.3 | 3.5 |
| V02 | | | | | | | |
| ZM-GVBAVAS1- | Zea mays | TGATCCGCCATCGCTTGCGCCT | 606 | EE3685 | 2.6 | 2.5 | 2.6 |
| V03 | | | | | | | |
| ZM-GVBAVAS1- | Zea mays | TGATCCGTCACCGCTCACGCCT | 507 | EE3686 | 6.1 | 5.9 | 6.3 |
| V04 | | | | | | | |
| ZM-GVBAVAS1- | Zea mays | TGATTTGTCAACGCGGACGCCA | 608 | EE3687 | 3.4 | 3.2 | 3.5 |
| V05 | | | | | | | |
| ZM-GVBAVAS1- | Zea mays | TCAGTCGTCCACGCTTACGCCA | 609 | EE3688 | 4.2 | 4.1 | 4.3 |
| V06 | | | | | | | |
| ZM-GVBAVAS1- | Zea mays | TGTCTAGTCATCGCATACGCCA | 610 | EE3689 | 2.5 | 2.5 | 2.6 |
| V07 | | | | | | | |
| ZM-GVBAVAS1- | Zea mays | TGAGTCTTCAGCGCCTACGCCA | 611 | EE3690 | 2.5 | 2.4 | 2.6 |
| V08 | | | | | | | |
| ZM-GVBAVAS1- | Zea mays | TGCTTCGTGATCGCTTGCGCCT | 612 | EE3691 | 172.6 | 167.4 | 177.9 |
| V09 | | | | | | | |
| ZM-GVBAVAS1- | Zea mays | TGATTCGTGCTCGCTTAGGCCC | 613 | EE3692 | 1.9 | 1.8 | 1.9 |
| V10 | | | | | | | |
| ZM-GVBAVAS1- | Zea mays | TGCTTCGTGATCGCTTGTGCCA | 614 | EE3693 | 1.7 | 1.7 | 1.8 |
| V11 | | | | | | | |
| ZM-GVBAVAS1- | Zea mays | CGATTCTTCATCACCTACGCCA | 615 | EE3694 | 2.5 | 2.4 | 2.6 |
| V12 | | | | | | | |
| ZM-GVBAVAS1- | Zea mays | TGATTCTTCATCGCCTTCACCA | 616 | EE3695 | 2.1 | 2.0 | 2.1 |
| V13 | | | | | | | |
| ZM-GVBAVAS1- | Zea mays | AGTTTCGTCATTGCTTACGTCA | 617 | EE3696 | 2.3 | 2.2 | 2.3 |
| V14 | | | | | | | |
| ZM-GVBAVAS1- | Zea mays | CGATTCGTCATCCCTTTCCCCA | 618 | EE3697 | 2.6 | 2.5 | 2.6 |
| V15 | | | | | | | |
| ZM-GVBAVAS1- | Zea mays | TGAATCGTGATCGGTTACACCA | 619 | EE3698 | 2.6 | 2.6 | 2.7 |
| V16 | | | | | | | |
| ZM-GVBAVAS1- | Zea mays | TCATTCGTCATATCGTACGCCA | 620 | EE3699 | 1.9 | 1.8 | 1.9 |
| V17 | | | | | | | |
| ZM-GVBAVAS1- | Zea mays | TGATTATTCATCGCTCACGCGA | 621 | EE3700 | 1.6 | 1.5 | 1.6 |
| V18 | | | | | | | |
| ZM-GVBAVASI- | Zea mays | TCATTCTTCATCGCTTTCACCA | 622 | EE3701 | 1.8 | 1.7 | 1.9 |
| V19 | | | | | | | |
| ZM-GVBAVAS1- | Zea mays | TAATTCGTCATCGCTTACATAA | 623 | EE3702 | 53.4 | 52.2 | 54.7 |
| V20 | | | | | | | |
| OS-GVBAVAS1- | Oryza sativa | GGAGCCGTCATCGCCTACGCCA | 624 | EE3703 | 46.9 | 45.6 | 48.2 |
| V01 | | | | | | | |
| OS-GVBAVAS1- | Oryza sativa | TGATGCGTCACCGCCTGCGCCA | 625 | EE3704 | 15.6 | 15.0 | 16.1 |
| V02 | | | | | | | |
| SB-GVBAVAS1- | Sorghum bicolor | TGATTCGTCATCGATGCCGCCG | 626 | EE3705 | 1.3 | 1.3 | 1.3 |
| V01 | | | | | | | |
| ZM-GVBAVAS1- | Zea mays | AGCATCGTCACCGCGTACGCCA | 627 | EE3706 | 25.7 | 25.0 | 26.4 |
| V28 | | | | | | | |
| ZM-GVBAVAS1- | Zea mays | CTGTTCGTCAACGCGTACGCCA | 628 | EE3707 | 2.5 | 2.4 | 2.5 |
| V63 | | | | | | | |
| ZM-GVBAVAS1- | Zea mays | TGGCTCGTCACCGCCGACGCCA | 629 | EE3708 | 2.6 | 2.6 | 2.7 |
| V42 | | | | | | | |
| ZM-GVBAVAS1- | Zea mays | TGCTTCGCCATCGCTGACGCGT | 630 | EE3709 | 2.4 | 2.4 | 2.5 |
| V82 | | | | | | | |
| BN-GVBAVAS1- | Brassica napus | AGATTCGTCATCGCCGACTCCA | 631 | EE3710 | 2.4 | 2.4 | 2.5 |
| V04 | | | | | | | |
| OS-GVBAVAS1- | Oryza sativa | TGATTCGTCATCGCTATCGTCT | 632 | EE3711 | 2.8 | 2.7 | 2.9 |
| V04 | | | | | | | |
| SB-GVBAVAS1- | Sorghum bicolor | TAATTCGTCATCGCGAACGACG | 633 | EE3712 | 2.2 | 2.1 | 2.2 |
| V55 | | | | | | | |
| SB-GVBAVAS1- | Sorghum bicolor | TGATTCGTCATCGCCTTCGTAT | 634 | EE3713 | 3.0 | 2.9 | 3.1 |
| V83 | | | | | | | |

[0198] The results of the expression profiling indicated that the cis-acting regulatory elements (SEQ ID NO:602-SEQ ID NO:634), exhibited activity as a modulating element within a chimeric regulatory element (for example a cis-acting regulatory element and a promoter regulatory element) (FIG. 20). Although there was some level of variation in the expression of the fluorescent coding sequence as compared to SEQ ID NO:584, most of the variant sequences expressed higher than the CaMV 35S minimal promoter control. The cis-acting regulatory elements were shown to drive robust expression of the fluorescent coding sequence in maize protoplasts. Those with skill in the art would appreciate that these cis-acting regulatory elements would also drive robust expression of a coding sequence in other plants. As such, the plant-derived variant cis-acting regulatory element (SEQ ID NO:602-SEQ ID NO:634) were exemplified for the first time as cis-acting regulatory elements capable of functioning as a modulating element within a chimeric regulatory element (for example a promoter and a cis-acting regulatory element) to drive expression of a coding sequence.

### Example 16: Identification of Additional Cis-Acting Regulatory Elements That Increase Expression of a Coding Sequence

[0199] Additional cis-acting regulatory elements are obtained from the PLACE database. The cis-acting regulatory elements that are obtained are listed as SEQ ID NOs:39-507 or SEQ ID NOs:635-2268. These regulatory elements are engineered in combination with promoter and used to produce a chimeric regulatory element. Those with skill in the art would appreciate that the cis-acting regulatory element could be included as a monomer, dimer, trimer, or in any copy number to drive robust expression of a coding sequence. The chimeric regulatory elements are engineered into standardized dicot or monocot protoplast testing vectors as described in Example 2 and 3, or any of the other Examples. Finally, the chimeric regulatory elements containing the novel cis-acting regulatory elements are tested in a soy hypocotyl protoplast assay as described in Example 4 to test the vectors to determine whether the cis-acting regulatory elements could enhance the expression of a downstream coding sequence operably linked to the chimeric cis-acting regulatory element and promoter. Likewise the chimeric regulatory elements are tested in a transient gene expression Zea mays leaf mesophyll protoplast platform as described in Examples 1 and 3 of patent application WO2018183878A1 to determine whether the cis-acting regulatory elements could enhance the expression of a downstream coding sequence operably linked to the chimeric cis-acting regulatory element and promoter. Those with skill in the art would appreciate that the chimeric regulatory elements could be tested in other plant expression systems.

[0200] The results of the expression profiling indicate that cis-acting regulatory elements of the subject disclosure (SEQ ID NOs:39-507 or SEQ ID NOs:635-2268) exhibit enhanced activity as a modulating element within a chimeric regulatory element. These specific cis-acting regulatory elements drive robust expression of the fluorescent coding sequence. As such, these newly identified cis-acting regulatory elements are exemplified for the first time as cis-acting regulatory elements capable of functioning as a modulating element within a chimeric regulatory element (for example a promoter and a cis-acting regulatory element) to drive expression of a coding sequence.

### Example 17: Transgenic Plants Containing Cis-Acting Regulatory Element That Increase Expression of a Coding Sequence

[0201] Construction of plant transformation vectors. Gene expression cassettes containing an active cis-acting regulatory element fused to a promoter (e.g. maize ubiquitin 1 promoter, 35S Cauliflower Mosaic Virus; Sugarcane bacilliform badnavirus promoter; promoters from rice actin genes; ubiquitin gene promoters; pEMU promoters; MAS promoter; maize H3 histone promoter; ALS promoter; phaseolin gene promoter; CAB promoter; RUBISCO promoter; LAT52 promoter; Zm13 promoter; and/or APG promoter are non-limiting examples of promoters known in the art that may be selected to drive expression of the gene of interest) are assembled onto plasmid vectors using standard molecular cloning methods. A gene of interest is cloned in directly downstream of the cis-acting regulatory element fused to a promoter. Next, a 3′ untranslated region (e.g., a ZmPER5 3′UTR; AtUbi103′UTR; AtEf1 3′UTR; or StPinII 3′UTR are non-limiting examples of 3′UTRs known in the art that may be selected to terminate expression of the gene of interest) is used to terminate transcription of the gene of interest. The completion of the gene expression cassettes are performed using standard molecular cloning methods and may include additional gene expression cassettes linked in trans or in cis to other gene expression cassettes that express other agronomically important traits and/or selectable markers.

[0202] Plant transformation. Further provided are non-limiting examples of plant transformation protocols for transformation of the gene expression cassettes containing the cis-acting regulatory element fused to a promoter. In light of the subject disclosure, additional crops can be transformed according to embodiments of the subject disclosure using techniques that are known in the art. Plant transformation of monocot plant species can be achieved. For Agrobacterium-mediated transformation of rye, see, e. g., Popelka J C, Xu J, Altpeter F., “Generation of rye with low transgene copy number after biolistic gene transfer and production of (Secale cereale L.) plants instantly marker-free transgenic rye,” Transgenic Res. 2003 October; 12(5):587-96.). For Agrobacterium-mediated transformation of sorghum, see, e. g., Zhao et al., “Agrobacterium-mediated sorghum transformation,” Plant Mol Biol. 2000 December; 44(6):789-98. For Agrobacterium-mediated transformation of barley, see, e. g., Tingay et al., “Agrobacterium tumefaciens-mediated barley transformation,” The Plant Journal, (1997) 11: 1369-1376. For Agrobacterium-mediated transformation of wheat, see, e.g., Cheng et al., “Genetic Transformation of Wheat Mediated by Agrobacterium tumefaciens,” Plant Physiol. 1997 November; 115(3):971-980. For Agrobacterium-mediated transformation of tobacco, see, e. g., U.S. Pat. App. Pub. No. US 2013/0157369 A1. For Agrobacterium-mediated transformation of rice, see, e.g., Hiei et al., “Transformation of rice mediated by Agrobacterium tumefaciens,” Plant Mol. Biol. 1997 September; 35(1-2):205-18. Plant transformation of dicot plant species can be achieved. For Agrobacterium-mediated transformation of Arabidopsis, see, e. g., Clough, S. J., & Bent, A. F. (1998). Floral dip: a simplified method for Agrobacterium-mediated transformation of Arabidopsis thaliana. The plant journal, 16(6), 735-743. For Agrobacterium-mediated transformation of cotton, see, e. g., Tohidfar, M., Mohammadi, M., & Ghareyazie, B. (2005). Agrobacterium-mediated transformation of cotton (Gossypium hirsutum) using a heterologous bean chitinase gene. Plant cell, tissue and organ culture, 83(1), 83-96. For Agrobacterium-mediated transformation of soybean, see, e. g., U.S. Pat. App. Pub. No. US 2014/0173780 A1. For Agrobacterium-mediated transformation of tobacco, see, e. g., An, G. (1985). High efficiency transformation of cultured tobacco cells. Plant Physiology, 79(2), 568-570.

[0203] Corn may be transformed with gene expression cassettes containing the cis-acting regulatory element fused to a chimeric regulatory element (for example a promoter and a cis-acting regulatory element) by utilizing the same techniques previously described in Example #8 of patent application WO 2007/053482.

[0204] Soybean may be transformed with gene expression cassettes containing the cis-acting regulatory element fused to a chimeric regulatory element (for example a promoter and a cis-acting regulatory element) by utilizing the same techniques previously described in Example #11 or Example #13 of patent application WO 2007/053482.

[0205] Cotton may be transformed gene expression cassettes containing the cis-acting regulatory element fused to a chimeric regulatory element (for example a promoter and a cis-acting regulatory element) by utilizing the same techniques previously described in Examples #14 of U.S. Pat. No. 7,838,733 or Example #12 of patent application WO 2007/053482 (Wright et al.).

[0206] Canola may be transformed with gene expression cassettes containing the cis-acting regulatory element fused to a chimeric regulatory element (for example a promoter and a cis-acting regulatory element) by utilizing the same techniques previously described in Example #26 of U.S. Pat. No. 7,838,733 or Example #22 of patent application WO 2007/053482 (Wright et al.).

[0207] Wheat may be transformed with gene expression cassettes containing the cis-acting regulatory element fused to a chimeric regulatory element (for example a promoter and a cis-acting regulatory element) by utilizing the same techniques previously described in Example #23 of patent application WO 2013/116700A1 (Lira et al.).

[0208] Rice may be transformed with gene expression cassettes containing the cis-acting regulatory element fused to a chimeric regulatory element (for example a promoter and a cis-acting regulatory element) by utilizing the same techniques previously described in Example #19 of patent application WO 2013/116700A1 (Lira et al.).

[0209] Arabidopsis may be transformed with gene expression cassettes containing the cis-acting regulatory element fused to a chimeric regulatory element (for example a promoter and a cis-acting regulatory element) by utilizing the same techniques previously described in Example #7 of patent application WO 2013/116700A1 (Lira et al.).

[0210] Tobacco may be transformed with gene expression cassettes containing the cis-acting regulatory element fused to a chimeric regulatory element (for example a promoter and a cis-acting regulatory element) by utilizing the same techniques previously described in Example #10 of patent application WO 2013/116700A1 (Lira et al.).

[0211] The Latin names for these and other plants are given below. It should be clear that other (non-Agrobacterium) transformation techniques can be used to transform gene expression cassettes containing the cis-acting regulatory element fused to a chimeric regulatory element (for example a promoter and a cis-acting regulatory element), for example, into these and other plants. Examples include, but are not limited to; Maize (Zea mays), Wheat (Triticum spp.), Rice (Oryza spp. and Zizania spp.), Barley (Hordeum spp.), Cotton (Abroma augusta and Gossypium spp.), Soybean (Glycine max), Sugar and table beets (Beta spp.), Sugar cane (Saccharum officinarum), Tomato (Lycopersicon esculentum and other spp., Physalis ixocarpa, Solanum incanum and other spp., and (Lyphomandra betacea), Potato (Solanum tuberosum), Sweet potato (Ipomoea batatas), Rye (Secale spp.), Peppers (Capsicum annuum, chinense, and frutescens), Lettuce (Lactuca sativa, perennis, and pulchella), Cabbage (Brassica spp.), Celery (Apium graveolens), Eggplant (Solanum melongena), Peanut (Arachis hypogea), Sorghum (Sorghum spp.), Alfalfa (Medicago sativa), Carrot (Daucus carota), Beans (Phaseolus spp. and other genera), Oats (Avena sativa and strigosa), Peas (Pisum, Vigna, and Tetragonolobus spp.), Sunflower (Helianthus annuus), Squash (Cucurbita spp.), Cucumber (Cucumis sativa), Tobacco (Nicotiana spp.), Arabidopsis (Arabidopsis thaliana), Turfgrass (Lolium, Agrostis, Poa, Cynodon, and other genera), Clover (Trifolium), Vetch (Vicia). Transformation of such plants, with gene expression cassettes containing the cis-acting regulatory element fused to a promoter to produce a chimeric regulatory element, for example, is contemplated in embodiments of the subject disclosure.

[0212] Use of the gene expression cassettes containing the cis-acting regulatory element fused to a promoter to produce a chimeric regulatory element can be deployed in many deciduous and evergreen timber species. Such applications are also within the scope of embodiments of this disclosure. These species include, but are not limited to; alder (Alnus spp.), ash (Fraxinus spp.), aspen and poplar species (Populus spp.), beech (Fagus spp.), birch (Betula spp.), cherry (Prunus spp.), eucalyptus (Eucalyptus spp.), hickory (Carya spp.), maple (Acer spp.), oak (Quercus spp.), and pine (Pinus spp.).

[0213] Use of the gene expression cassettes containing the cis-acting regulatory element fused to a promoter can be deployed in ornamental and fruit-bearing species. Such applications are also within the scope of embodiments of this disclosure. Examples include, but are not limited to; rose (Rosa spp.), burning bush (Euonymus spp.), petunia (Petunia spp.), begonia (Begonia spp.), rhododendron (Rhododendron spp.), crabapple or apple (Malus spp.), pear (Pyrus spp.), peach (Prunus spp.), and marigolds (Tagetes spp.).

[0214] Molecular analyses. Molecular analysis of transformed plant tissues are performed on samples obtained from plants materials transformed with gene expression cassettes containing the cis-acting regulatory element fused to a promoter to confirm the presence and copy number of a stably integrated cis-acting regulatory element fused to a promoter and to quantitate the expressed quantity of the protein expressed from the gene of interest being produced in the plant cell. Various assays are known in the art and can be utilized for molecular analysis of the cis-acting regulatory element fused to a promoter within plant material. As such, the cis-acting regulatory element is exemplified for the first time as a cis-acting regulatory element capable of functioning as a modulating element within a chimeric regulatory element (for example a chimeric promoter) to drive expression of a coding sequence.

[0215] While the present disclosure may be susceptible to various modifications and alternative forms, specific embodiments have been described by way of example in detail herein. However, it should be understood that the present disclosure is not intended to be limited to the particular forms disclosed. Rather, the present disclosure is to cover all modifications, equivalents, and alternatives falling within the scope of the present disclosure as defined by the following appended claims and their legal equivalents.

The application's sequence listing, which the Patent Office published only in electronic form, follows.

SEQUENCE LISTING (2268 sequences)

SEQ ID NO: 1 - DNA, 18 bp, synthetic construct
  misc_feature 1..18: note = cis-acting regulatory element for use in chimeric regulatoryelements
  source 1..18: mol_type = other DNA
gtttacataaatggaaaa

SEQ ID NO: 2 - DNA, 19 bp, synthetic construct
  misc_feature 1..19: note = cis-acting regulatory element for use in chimeric regulatoryelements
  source 1..19: mol_type = other DNA
tatctagtgagtcacttca

SEQ ID NO: 3 - DNA, 20 bp, synthetic construct
  misc_feature 1..20: note = cis-acting regulatory element for use in chimeric regulatoryelements
  source 1..20: mol_type = other DNA
cgaaaccagcaacggtccag

SEQ ID NO: 4 - DNA, 21 bp, synthetic construct
  misc_feature 1..21: note = cis-acting regulatory element for use in chimeric regulatoryelements
  source 1..21: mol_type = other DNA
ggccgataacaaactccggcc

SEQ ID NO: 5 - DNA, 22 bp, synthetic construct
  misc_feature 1..22: note = cis-acting regulatory element for use in chimeric regulatoryelements
  source 1..22: mol_type = other DNA
gaaatagcaaatgttaaaaata

SEQ ID NO: 6 - DNA, 23 bp, synthetic construct
  misc_feature 1..23: note = cis-acting regulatory element for use in chimeric regulatoryelements
  source 1..23: mol_type = other DNA
tttatttaccaaacggtaacatc

SEQ ID NO: 7 - DNA, 24 bp, synthetic construct
  misc_feature 1..24: note = cis-acting regulatory element for use in chimeric regulatoryelements
  source 1..24: mol_type = other DNA
gatatattaatattttattttata

SEQ ID NO: 8 - DNA, 24 bp, synthetic construct
  misc_feature 1..24: note = cis-acting regulatory element for use in chimeric regulatoryelements
  source 1..24: mol_type = other DNA
tggcggctcttatctcacgtgatg

SEQ ID NO: 9 - DNA, 24 bp, synthetic construct
  misc_feature 1..24: note = cis-acting regulatory element for use in chimeric regulatoryelements
  source 1..24: mol_type = other DNA
ctcttagaccgccttctttgaaag

SEQ ID NO: 10 - DNA, 24 bp, synthetic construct
  misc_feature 1..24: note = cis-acting regulatory element for use in chimeric regulatoryelements
  source 1..24: mol_type = other DNA
ataatgggccacactgtggggcat

SEQ ID NO: 11 - DNA, 10 bp, synthetic construct
  misc_feature 1..10: note = cis-acting regulatory element for use in chimeric regulatoryelements
  source 1..10: mol_type = other DNA
cataaacacc

SEQ ID NO: 12 - DNA, 11 bp, synthetic construct
  misc_feature 1..11: note = cis-acting regulatory element for use in chimeric regulatoryelements
  source 1..11: mol_type = other DNA
gggcacgcgtc

SEQ ID NO: 13 - DNA, 49 bp, synthetic construct
  misc_feature 1..49: note = cis-acting regulatory element for use in chimeric regulatoryelements
  source 1..49: mol_type = other DNA
cgcaagacccttcctctatataaggaagttcatttcatttggagaggac

SEQ ID NO: 14 - DNA, 67 bp, synthetic construct
  misc_feature 1..67: note = cis-acting regulatory element for use in chimeric regulatoryelements
  source 1..67: mol_type = other DNA
tatttttacaacaattaccaacaacaacaaacaacaaacaacattacaattactatttacaattaca

SEQ ID NO: 15 - DNA, 203 bp, synthetic construct
  misc_feature 1..203: note = cis-acting regulatory element for use in chimeric regulatoryelements
  source 1..203: mol_type = other DNA
gaattcgtttacataaatggaaaacataaacaccgtttacataaatggaaaagggcacgcgtcgtttacataaatggaaaacgcaagacccttcctctatataaggaagttcatttcatttggagaggactatttttacaacaattaccaacaacaacaaacaacaaacaacattacaattactatttacaattacaccatgg

SEQ ID NO: 16 - DNA, 206 bp, synthetic construct
  misc_feature 1..206: note = cis-acting regulatory element for use in chimeric regulatoryelements
  source 1..206: mol_type = other DNA
gaattctatctagtgagtcacttcacataaacacctatctagtgagtcacttcagggcacgcgtctatctagtgagtcacttcacgcaagacccttcctctatataaggaagttcatttcatttggagaggactatttttacaacaattaccaacaacaacaaacaacaaacaacattacaattactatttacaattacaccatgg

SEQ ID NO: 17 - DNA, 209 bp, synthetic construct
  misc_feature 1..209: note = cis-acting regulatory element for use in chimeric regulatoryelements
  source 1..209: mol_type = other DNA
gaattccgaaaccagcaacggtccagcataaacacccgaaaccagcaacggtccaggggcacgcgtccgaaaccagcaacggtccagcgcaagacccttcctctatataaggaagttcatttcatttggagaggactatttttacaacaattaccaacaacaacaaacaacaaacaacattacaattactatttacaattacaccatgg

SEQ ID NO: 18 - DNA, 212 bp, synthetic construct
  misc_feature 1..212: note = cis-acting regulatory element for use in chimeric regulatoryelements
  source 1..212: mol_type = other DNA
gaattcggccgataacaaactccggcccataaacaccggccgataacaaactccggccgggcacgcgtcggccgataacaaactccggcccgcaagacccttcctctatataaggaagttcatttcatttggagaggactatttttacaacaattaccaacaacaacaaacaacaaacaacattacaattactatttacaattacaccatgg

SEQ ID NO: 19 - DNA, 215 bp, synthetic construct
  misc_feature 1..215: note = cis-acting regulatory element for use in chimeric regulatoryelements
  source 1..215: mol_type = other DNA
gaattcgaaatagcaaatgttaaaaatacataaacaccgaaatagcaaatgttaaaaatagggcacgcgtcgaaatagcaaatgttaaaaatacgcaagacccttcctctatataaggaagttcatttcatttggagaggactatttttacaacaattaccaacaacaacaaacaacaaacaacattacaattactatttacaattacaccatgg

SEQ ID NO: 20 - DNA, 218 bp, synthetic construct
  misc_feature 1..218: note = cis-acting regulatory element for use in chimeric regulatoryelements
  source 1..218: mol_type = other DNA
gaattctttatttaccaaacggtaacatccataaacacctttatttaccaaacggtaacatcgggcacgcgtctttatttaccaaacggtaacatccgcaagacccttcctctatataaggaagttcatttcatttggagaggactatttttacaacaattaccaacaacaacaaacaacaaacaacattacaattactatttacaattacaccatgg

SEQ ID NO: 21 - DNA, 221 bp, synthetic construct
  misc_feature 1..221: note = cis-acting regulatory element for use in chimeric regulatoryelements
  source 1..221: mol_type = other DNA
gaattcgatatattaatattttattttatacataaacaccgatatattaatattttattttatagggcacgcgtcgatatattaatattttattttatacgcaagacccttcctctatataaggaagttcatttcatttggagaggactatttttacaacaattaccaacaacaacaaacaacaaacaacattacaattactatttacaattacaccatgg

SEQ ID NO: 22 - DNA, 221 bp, synthetic construct
  misc_feature 1..221: note = cis-acting regulatory element for use in chimeric regulatoryelements
  source 1..221: mol_type = other DNA
gaattctggcggctcttatctcacgtgatgcataaacacctggcggctcttatctcacgtgatggggcacgcgtctggcggctcttatctcacgtgatgcgcaagacccttcctctatataaggaagttcatttcatttggagaggactatttttacaacaattaccaacaacaacaaacaacaaacaacattacaattactatttacaattacaccatgg

SEQ ID NO: 23 - DNA, 221 bp, synthetic construct
  misc_feature 1..221: note = cis-acting regulatory element for use in chimeric regulatoryelements
  source 1..221: mol_type = other DNA
gaattcctcttagaccgccttctttgaaagcataaacaccctcttagaccgccttctttgaaaggggcacgcgtcctcttagaccgccttctttgaaagcgcaagacccttcctctatataaggaagttcatttcatttggagaggactatttttacaacaattaccaacaacaacaaacaacaaacaacattacaattactatttacaattacaccatgg

SEQ ID NO: 24 - DNA, 221 bp, synthetic construct
  misc_feature 1..221: note = cis-acting regulatory element for use in chimeric regulatoryelements
  source 1..221: mol_type = other DNA
gaattcataatgggccacactgtggggcatcataaacaccataatgggccacactgtggggcatgggcacgcgtcataatgggccacactgtggggcatcgcaagacccttcctctatataaggaagttcatttcatttggagaggactatttttacaacaattaccaacaacaacaaacaacaaacaacattacaattactatttacaattacaccatgg

SEQ ID NO: 25 - DNA, 20 bp, synthetic construct
  misc_feature 1..20: note = cis-acting regulatory element for use in chimeric regulatoryelements
  source 1..20: mol_type = other DNA
tgacgtaagggatgacgcac

SEQ ID NO: 26 - DNA, 21 bp, synthetic construct
  misc_feature 1..21: note = cis-acting regulatory element for use in chimeric regulatoryelements
  source 1..21: mol_type = other DNA
atgacgtaagccatgacgtct

SEQ ID NO: 27 - DNA, 20 bp, synthetic construct
  misc_feature 1..20: note = cis-acting regulatory element for use in chimeric regulatoryelements
  source 1..20: mol_type = other DNA
tgacgtaagccatgacgtct

SEQ ID NO: 28 - DNA, 21 bp, synthetic construct
  misc_feature 1..21: note = cis-acting regulatory element for use in chimeric regulatoryelements
  source 1..21: mol_type = other DNA
atgacgtaagcaatgacgtct

SEQ ID NO: 29 - DNA, 20 bp, synthetic construct
  misc_feature 1..20: note = cis-acting regulatory element for use in chimeric regulatoryelements
  source 1..20: mol_type = other DNA
atgacgtaagcgatgacgtc

SEQ ID NO: 30 - DNA, 20 bp, synthetic construct
  misc_feature 1..20: note = cis-acting regulatory element for use in chimeric regulatoryelements
  source 1..20: mol_type = other DNA
atgacgtcagccatgacgtc

SEQ ID NO: 31 - DNA, 20 bp, synthetic construct
  misc_feature 1..20: note = cis-acting regulatory element for use in chimeric regulatoryelements
  source 1..20: mol_type = other DNA
tgacgtaagccatgaagtct

SEQ ID NO: 32 - DNA, 20 bp, synthetic construct
  misc_feature 1..20: note = cis-acting regulatory element for use in chimeric regulatoryelements
  source 1..20: mol_type = other DNA
atgacgtaggccatgacgtc

SEQ ID NO: 33 - DNA, 19 bp, synthetic construct
  misc_feature 1..19: note = cis-acting regulatory element for use in chimeric regulatoryelements
  source 1..19: mol_type = other DNA
atgacgtaatccatgacgt

SEQ ID NO: 34 - DNA, 19 bp, synthetic construct
  misc_feature 1..19: note = cis-acting regulatory element for use in chimeric regulatoryelements
  source 1..19: mol_type = other DNA
tgacgtaaggcatgacgtc

SEQ ID NO: 35 - DNA, 18 bp, synthetic construct
  misc_feature 1..18: note = cis-acting regulatory element for use in chimeric regulatoryelements
  source 1..18: mol_type = other DNA
tgacgaacgcagtgacga

SEQ ID NO: 36 - DNA, 18 bp, synthetic construct
  misc_feature 1..18: note = cis-acting regulatory element for use in chimeric regulatoryelements
  source 1..18: mol_type = other DNA
cgacgaacgcagtgacga

SEQ ID NO: 37 - DNA, 18 bp, synthetic construct
  misc_feature 1..18: note = cis-acting regulatory element for use in chimeric regulatoryelements
  source 1..18: mol_type = other DNA
tgacgaacgcagtgacgg

SEQ ID NO: 38 - DNA, 18 bp, synthetic construct
  misc_feature 1..18: note = cis-acting regulatory element for use in chimeric regulatoryelements
  source 1..18: mol_type = other DNA
tgacgaaagcagtgacga

SEQ ID NO: 39 - skipped

SEQ ID NO: 40 - DNA, 21 bp, synthetic construct
  misc_feature 1..21: note = cis-acting regulatory element for use in chimeric regulatoryelements
  source 1..21: mol_type = other DNA
gcttttgatgacttcaaacac

SEQ ID NO: 41 - DNA, 30 bp, synthetic construct
  misc_feature 1..30: note = cis-acting regulatory element for use in chimeric regulatoryelements
  source 1..30: mol_type = other DNA
cgtgcaagcccaaaggccaatcggcccaga

SEQ ID NO: 42-44 - skipped (3 entries)

SEQ ID NO: 45 - DNA, 20 bp, synthetic construct
  misc_feature 1..20: note = cis-acting regulatory element for use in chimeric regulatoryelements
  source 1..20: mol_type = other DNA
acataaaataaaaaaaggca

SEQ ID NO: 46 - DNA, 14 bp, synthetic construct
  misc_feature 1..14: note = cis-acting regulatory element for use in chimeric regulatoryelements
  source 1..14: mol_type = other DNA
cactaaattgtcac

SEQ ID NO: 47 - DNA, 20 bp, synthetic construct
  misc_feature 1..20: note = cis-acting regulatory element for use in chimeric regulatoryelements
  source 1..20: mol_type = other DNA
tgagctaagcacatacgtca

SEQ ID NO: 48 - DNA, 23 bp, synthetic construct
  misc_feature 1..23: note = cis-acting regulatory element for use in chimeric regulatoryelements
  source 1..23: mol_type = other DNA
tttatttaccaaacggtaacatc

SEQ ID NO: 49 - DNA, 23 bp, synthetic construct
  misc_feature 1..23: note = cis-acting regulatory element for use in chimeric regulatoryelements
  source 1..23: mol_type = other DNA
gacgtgtaaagtaaatttacaac

SEQ ID NO: 50 - DNA, 27 bp, synthetic construct
  misc_feature 1..27: note = cis-acting regulatory element for use in chimeric regulatoryelements
  source 1..27: mol_type = other DNA
tccgccwcttgtattcgttgcgttgma

SEQ ID NO: 51 - skipped

SEQ ID NO: 52 - DNA, 21 bp, synthetic construct
  misc_feature 1..21: note = cis-acting regulatory element for use in chimeric regulatoryelements
  source 1..21: mol_type = other DNA
aaatagataaataaaaacatt

SEQ ID NO: 53 - DNA, 12 bp, synthetic construct
  misc_feature 1..12: note = cis-acting regulatory element for use in chimeric regulatoryelements
  source 1..12: mol_type = other DNA
tgtggttatata

SEQ ID NO: 54 - DNA, 10 bp, synthetic construct
  misc_feature 1..10: note = cis-acting regulatory element for use in chimeric regulatoryelements
  source 1..10: mol_type = other DNA
gaawttgtga

SEQ ID NO: 55 - skipped

SEQ ID NO: 56 - DNA, 14 bp, synthetic construct
  misc_feature 1..14: note = cis-acting regulatory element for use in chimeric regulatoryelements
  source 1..14: mol_type = other DNA
caacaaactatatc

SEQ ID NO: 57 - skipped

SEQ ID NO: 58 - DNA, 10 bp, synthetic construct
  misc_feature 1..10: note = cis-acting regulatory element for use in chimeric regulatoryelements
  source 1..10: mol_type = other DNA
rtacgtggcr

SEQ ID NO: 59 - DNA, 11 bp, synthetic construct
  misc_feature 1..11: note = cis-acting regulatory element for use in chimeric regulatoryelements
  source 1..11: mol_type = other DNA
ggacgcgtggc

SEQ ID NO: 60 - DNA, 11 bp, synthetic construct
  misc_feature 1..11: note = cis-acting regulatory element for use in chimeric regulatoryelements
  source 1..11: mol_type = other DNA
atgtacgaagc

SEQ ID NO: 61 - DNA, 11 bp, synthetic construct
  misc_feature 1..11: note = cis-acting regulatory element for use in chimeric regulatoryelements
  source 1..11: mol_type = other DNA
tgttacgtgcc

SEQ ID NO: 62 - DNA, 19 bp, synthetic construct
  misc_feature 1..19: note = cis-acting regulatory element for use in chimeric regulatoryelements
  source 1..19: mol_type = other DNA
gcatctttactttagcatc

SEQ ID NO: 63 - DNA, 12 bp, synthetic construct
  misc_feature 1..12: note = cis-acting regulatory element for use in chimeric regulatoryelements
  source 1..12: mol_type = other DNA
cctacgtggcgg

SEQ ID NO: 64 - DNA, 10 bp, synthetic construct
  misc_feature 1..10: note = cis-acting regulatory element for use in chimeric regulatoryelements
  source 1..10: mol_type = other DNA
cgcacgtgtc

SEQ ID NO: 65 - DNA, 10 bp, synthetic construct
  misc_feature 1..10: note = cis-acting regulatory element for use in chimeric regulatoryelements
  source 1..10: mol_type = other DNA
gcaacgtgtc

SEQ ID NO: 66 - DNA, 10 bp, synthetic construct
  misc_feature 1..10: note = cis-acting regulatory element for use in chimeric regulatoryelements
  source 1..10: mol_type = other DNA
gccacgtaca

SEQ ID NO: 67 - DNA, 11 bp, synthetic construct
  misc_feature 1..11: note = cis-acting regulatory element for use in chimeric regulatoryelements
  source 1..11: mol_type = other DNA
gtacgtggcgc

SEQ ID NO: 68 - DNA, 10 bp, synthetic construct
  misc_feature 1..10: note = cis-acting regulatory element for use in chimeric regulatoryelements
  source 1..10: mol_type = other DNA
cctacgtggc

SEQ ID NO: 69 - skipped

SEQ ID NO: 70 - DNA, 10 bp, synthetic construct
  misc_feature 1..10: note = cis-acting regulatory element for use in chimeric regulatoryelements
  source 1..10: mol_type = other DNA
ryacgtggyr

SEQ ID NO: 71 - DNA, 10 bp, synthetic construct
  misc_feature 1..10: note = cis-acting regulatory element for use in chimeric regulatoryelements
  source 1..10: mol_type = other DNA
gccacgtggg

SEQ ID NO: 72 - DNA, 12 bp, synthetic construct
  misc_feature 1..12: note = cis-acting regulatory element for use in chimeric regulatoryelements
  source 1..12: mol_type = other DNA
cgccacgtgtcc

SEQ ID NO: 73 - DNA, 10 bp, synthetic construct
  misc_feature 1..10: note = cis-acting regulatory element for use in chimeric regulatoryelements
  source 1..10: mol_type = other DNA
tccacgtctc

SEQ ID NO: 74 - skipped

SEQ ID NO: 75 - DNA, 12 bp, synthetic construct
  misc_feature 1..12: note = cis-acting regulatory element for use in chimeric regulatoryelements
  source 1..12: mol_type = other DNA
acgcgtgtcctc

SEQ ID NO: 76 - DNA, 12 bp, synthetic construct
  misc_feature 1..12: note = cis-acting regulatory element for use in chimeric regulatoryelements
  source 1..12: mol_type = other DNA
acgcgcctcctc

SEQ ID NO: 77 - DNA, 10 bp, synthetic construct
  misc_feature 1..10: note = cis-acting regulatory element for use in chimeric regulatoryelements
  source 1..10: mol_type = other DNA
gccacttgtc

SEQ ID NO: 78-79 - skipped (2 entries)

SEQ ID NO: 80 - DNA, 10 bp, synthetic construct
  misc_feature 1..10: note = cis-acting regulatory element for use in chimeric regulatoryelements
  source 1..10: mol_type = other DNA
gccgcgtggc

SEQ ID NO: 81 - DNA, 10 bp, synthetic construct
  misc_feature 1..10: note = cis-acting regulatory element for use in chimeric regulatoryelements
  source 1..10: mol_type = other DNA
agtacgtggc

SEQ ID NO: 82-83 - skipped (2 entries)

SEQ ID NO: 84 - DNA, 11 bp, synthetic construct
  misc_feature 1..11: note = cis-acting regulatory element for use in chimeric regulatoryelements
  source 1..11: mol_type = other DNA
ggacacgtggc

SEQ ID NO: 85 - skipped

SEQ ID NO: 86 - DNA, 10 bp, synthetic construct
  misc_feature 1..10: note = cis-acting regulatory element for use in chimeric regulatoryelements
  source 1..10: mol_type = other DNA
gacacgtaga

SEQ ID NO: 87-92 - skipped (6 entries)

SEQ ID NO: 93 - DNA, 10 bp, synthetic construct
  misc_feature 1..10: note = cis-acting regulatory element for use in chimeric regulatoryelements
  source 1..10: mol_type = other DNA
gccacgtggc

SEQ ID NO: 94 - DNA, 11 bp, synthetic construct
  misc_feature 1..11: note = cis-acting regulatory element for use in chimeric regulatoryelements
  source 1..11: mol_type = other DNA
acacacgtcaa

SEQ ID NO: 95 - DNA, 10 bp, synthetic construct
  misc_feature 1..10: note = cis-acting regulatory element for use in chimeric regulatoryelements
  source 1..10: mol_type = other DNA
gtacgtggcg

SEQ ID NO: 96-97 - skipped (2 entries)

SEQ ID NO: 98 - DNA, 12 bp, synthetic construct
  misc_feature 1..12: note = cis-acting regulatory element for use in chimeric regulatoryelements
  source 1..12: mol_type = other DNA
ccaccaaccccc

SEQ ID NO: 99 - DNA, 10 bp, synthetic construct
  misc_feature 1..10: note = cis-acting regulatory element for use in chimeric regulatoryelements
  source 1..10: mol_type = other DNA
cccacctacc

SEQ ID NO: 100 - DNA, 16 bp, synthetic construct
  misc_feature 1..16: note = cis-acting regulatory element for use in chimeric regulatoryelements
  source 1..16: mol_type = other DNA
ttdccwwwwwwgghaa

SEQ ID NO: 101 - DNA, 15 bp, synthetic construct
  misc_feature 1..15: note = cis-acting regulatory element for use in chimeric regulatoryelements
  source 1..15: mol_type = other DNA
ttwccwwwwnnggww

SEQ ID NO: 102 - skipped

SEQ ID NO: 103 - DNA, 18 bp, synthetic construct
  misc_feature 1..18: note = cis-acting regulatory element for use in chimeric regulatoryelements
  source 1..18: mol_type = other DNA
nttdccwwwwnnggwaan

SEQ ID NO: 104 - DNA, 18 bp, synthetic construct
  misc_feature 1..18: note = cis-acting regulatory element for use in chimeric regulatoryelements
  source 1..18: mol_type = other DNA
nnwnccawwwwtrgwwan

SEQ ID NO: 105 - DNA, 16 bp, synthetic construct
  misc_feature 1..16: note = cis-acting regulatory element for use in chimeric regulatoryelements
  source 1..16: mol_type = other DNA
ttwcyawwwwtrgwaa

SEQ ID NO: 106 - skipped

SEQ ID NO: 107 - DNA, 28 bp, synthetic construct
  misc_feature 1..28: note = cis-acting regulatory element for use in chimeric regulatoryelements
  source 1..28: mol_type = other DNA
aaaaagtaaaaagtaaaaaagtaaaaag

SEQ ID NO: 108 - DNA, 17 bp, synthetic construct
  misc_feature 1..17: note = cis-acting regulatory element for use in chimeric regulatoryelements
  source 1..17: mol_type = other DNA
ttacgcaagcaatgaca

SEQ ID NO: 109 - DNA, 18 bp, synthetic construct
  misc_feature 1..18: note = cis-acting regulatory element for use in chimeric regulatoryelements
  source 1..18: mol_type = other DNA
tgaggagacttgtgaggt

SEQ ID NO: 110-119 - skipped (10 entries)

SEQ ID NO: 120 - DNA, 20 bp, synthetic construct
  misc_feature 1..20: note = cis-acting regulatory element for use in chimeric regulatoryelements
  source 1..20: mol_type = other DNA
cgaaaccagcaacggtccag

SEQ ID NO: 121 - skipped

SEQ ID NO: 122 - DNA, 10 bp, synthetic construct
  misc_feature 1..10: note = cis-acting regulatory element for use in chimeric regulatoryelements
  source 1..10: mol_type = other DNA
agcaacggtc

SEQ ID NO: 123 - DNA, 17 bp, synthetic construct
  misc_feature 1..17: note = cis-acting regulatory element for use in chimeric regulatoryelements
  source 1..17: mol_type = other DNA
agttgaatgggggtgca

SEQ ID NO: 124-125 - skipped (2 entries)

SEQ ID NO: 126 - DNA, 29 bp, synthetic construct
  misc_feature 1..29: note = cis-acting regulatory element for use in chimeric regulatoryelements
  source 1..29: mol_type = other DNA
ccactgacgtaagggatgacgcacaatcc

SEQ ID NO: 127 - DNA, 15 bp, synthetic construct
  misc_feature 1..15: note = cis-acting regulatory element for use in chimeric regulatoryelements
  source 1..15: mol_type = other DNA
aaatgacgaaaatgc

SEQ ID NO: 128 - DNA, 21 bp, synthetic construct
  misc_feature 1..21: note = cis-acting regulatory element for use in chimeric regulatoryelements
  source 1..21: mol_type = other DNA
tgagctaagcacatacgtcag

SEQ ID NO: 129 - skipped

SEQ ID NO: 130 - DNA, 18 bp, synthetic construct
  misc_feature 1..18: note = cis-acting regulatory element for use in chimeric regulatoryelements
  source 1..18: mol_type = other DNA
ttacgcaagcaatgacat

SEQ ID NO: 131 - DNA, 12 bp, synthetic construct
  misc_feature 1..12: note = cis-acting regulatory element for use in chimeric regulatoryelements
  source 1..12: mol_type = other DNA
aatatttttatt

SEQ ID NO: 132-135 - skipped (4 entries)

SEQ ID NO: 136 - DNA, 31 bp, synthetic construct
  misc_feature 1..31: note = cis-acting regulatory element for use in chimeric regulatoryelements
  source 1..31: mol_type = other DNA
aatatactagtattatttactaaaaaaaatc

SEQ ID NO: 137-139 - skipped (3 entries)

SEQ ID NO: 140 - DNA, 10 bp, synthetic construct
  misc_feature 1..10: note = cis-acting regulatory element for use in chimeric regulatoryelements
  source 1..10: mol_type = other DNA
cttgtcgtca

SEQ ID NO: 141 - DNA, 10 bp, synthetic construct
  misc_feature 1..10: note = cis-acting regulatory element for use in chimeric regulatoryelements
  source 1..10: mol_type = other DNA
gctaaacaat

SEQ ID NO: 142 - skipped

SEQ ID NO: 143 - DNA, 11 bp, synthetic construct
  misc_feature 1..11: note = cis-acting regulatory element for use in chimeric regulatoryelements
  source 1..11: mol_type = other DNA
atagaaatcaa

SEQ ID NO: 144 - DNA, 14 bp, synthetic construct
  misc_feature 1..14: note = cis-acting regulatory element for use in chimeric regulatoryelements
  source 1..14: mol_type = other DNA
taaaagttaaaaac

SEQ ID NO: 145 - DNA, 11 bp, synthetic construct
  misc_feature 1..11: note = cis-acting regulatory element for use in chimeric regulatoryelements
  source 1..11: mol_type = other DNA
tctaagcaaag

SEQ ID NO: 146 - DNA, 14 bp, synthetic construct
  misc_feature 1..14: note = cis-acting regulatory element for use in chimeric regulatoryelements
  source 1..14: mol_type = other DNA
ctgtgattaaatat

SEQ ID NO: 147 - DNA, 14 bp, synthetic construct
  misc_feature 1..14: note = cis-acting regulatory element for use in chimeric regulatoryelements
  source 1..14: mol_type = other DNA
tattggttactaaa

SEQ ID NO: 148 - DNA, 14 bp, synthetic construct
  misc_feature 1..14: note = cis-acting regulatory element for use in chimeric regulatoryelements
  source 1..14: mol_type = other DNA
aaacgacaccgttt

SEQ ID NO: 149 - DNA, 18 bp, synthetic construct
  misc_feature 1..18: note = cis-acting regulatory element for use in chimeric regulatoryelements
  source 1..18: mol_type = other DNA
tcccggtacacacttctt

SEQ ID NO: 150 - skipped

SEQ ID NO: 151 - DNA, 16 bp, synthetic construct
  misc_feature 1..16: note = cis-acting regulatory element for use in chimeric regulatoryelements
  source 1..16: mol_type = other DNA
gtccmtcmaacctamc

SEQ ID NO: 152-153 - skipped (2 entries)

SEQ ID NO: 154 - DNA, 21 bp, synthetic construct
  misc_feature 1..21: note = cis-acting regulatory element for use in chimeric regulatoryelements
  source 1..21: mol_type = other DNA
aattccatagaatagataata

SEQ ID NO: 155-157 - skipped (3 entries)

SEQ ID NO: 158 - DNA, 16 bp, synthetic construct
  misc_feature 1..16: note = cis-acting regulatory element for use in chimeric regulatoryelements
  source 1..16: mol_type = other DNA
tgaaaacagtgagtta

SEQ ID NO: 159 - DNA, 11 bp, synthetic construct
  misc_feature 1..11: note = cis-acting regulatory element for use in chimeric regulatoryelements
  source 1..11: mol_type = other DNA
taactsagtta

SEQ ID NO: 160 - DNA, 20 bp, synthetic construct
  misc_feature 1..20: note = cis-acting regulatory element for use in chimeric regulatoryelements
  source 1..20: mol_type = other DNA
aataataataataataaata

SEQ ID NO: 161-167 - skipped (7 entries)

SEQ ID NO: 168 - DNA, 18 bp, synthetic construct
  misc_feature 1..18: note = cis-acting regulatory element for use in chimeric regulatoryelements
  source 1..18: mol_type = other DNA
gtttacataaatggaaaa

SEQ ID NO: 169 - DNA, 18 bp, synthetic construct
  misc_feature 1..18: note = cis-acting regulatory element for use in chimeric regulatoryelements
  source 1..18: mol_type = other DNA
cttacctttcatggatta

SEQ ID NO: 170 - DNA, 18 bp, synthetic construct
  misc_feature 1..18: note = cis-acting regulatory element for use in chimeric regulatoryelements
  source 1..18: mol_type = other DNA
ctttccatttttagtaac

SEQ ID NO: 171 - DNA, 10 bp, synthetic construct
  misc_feature 1..10: note = cis-acting regulatory element for use in chimeric regulatoryelements
  source 1..10: mol_type = other DNA
ccwwwwwwgg

SEQ ID NO: 172 - DNA, 10 bp, synthetic construct
  misc_feature 1..10: note = cis-acting regulatory element for use in chimeric regulatoryelements
  source 1..10: mol_type = other DNA
cwwwwwwwwg

SEQ ID NO: 173 - DNA, 12 bp, synthetic construct
  misc_feature 1..12: note = cis-acting regulatory element for use in chimeric regulatoryelements
  source 1..12: mol_type = other DNA
ccwwwwwwwwgg

SEQ ID NO: 174-177 - skipped (4 entries)

SEQ ID NO: 178 - DNA, 11 bp, synthetic construct
  misc_feature 1..11: note = cis-acting regulatory element for use in chimeric regulatoryelements
  source 1..11: mol_type = other DNA
cctcgtgtctc

SEQ ID NO: 179 - skipped

SEQ ID NO: 180 - DNA, 10 bp, synthetic construct
  misc_feature 1..10: note = cis-acting regulatory element for use in chimeric regulatoryelements
  source 1..10: mol_type = other DNA
aacgcgtgtc

SEQ ID NO: 181-186 - skipped (6 entries)

SEQ ID NO: 187 - DNA, 33 bp, synthetic construct
  misc_feature 1..33: note = cis-acting regulatory element for use in chimeric regulatoryelements
  source 1..33: mol_type = other DNA
gataaagattacttcagatataacaaacgttac

SEQ ID NO: 188 - DNA, 16 bp, synthetic construct
  misc_feature 1..16: note = cis-acting regulatory element for use in chimeric regulatoryelements
  source 1..16: mol_type = other DNA
cgtgtcgtccatgcat

SEQ ID NO: 189-190 - skipped (2 entries)

SEQ ID NO: 191 - DNA, 11 bp, synthetic construct
  misc_feature 1..11: note = cis-acting regulatory element for use in chimeric regulatoryelements
  source 1..11: mol_type = other DNA
acgtattaaaa

SEQ ID NO: 192 - DNA, 28 bp, synthetic construct
  misc_feature 1..28: note = cis-acting regulatory element for use in chimeric regulatoryelements
  source 1..28: mol_type = other DNA
aakaatwyrtawataaaamttttatwta

SEQ ID NO: 193 - skipped

SEQ ID NO: 194 - DNA, 10 bp, synthetic construct
  misc_feature 1..10: note = cis-acting regulatory element for use in chimeric regulatoryelements
  source 1..10: mol_type = other DNA
ccacgtggcc

SEQ ID NO: 195-197 - skipped (3 entries)

SEQ ID NO: 198 - DNA, 13 bp, synthetic construct
  misc_feature 1..13: note = cis-acting regulatory element for use in chimeric regulatoryelements
  source 1..13: mol_type = other DNA
aagattgattgag

SEQ ID NO: 199 - DNA, 10 bp, synthetic construct
  misc_feature 1..10: note = cis-acting regulatory element for use in chimeric regulatoryelements
  source 1..10: mol_type = other DNA
acagttacta

SEQ ID NO: 200 - DNA, 12 bp, synthetic construct
  misc_feature 1..12: note = cis-acting regulatory element for use in chimeric regulatoryelements
  source 1..12: mol_type = other DNA
atttatataaat

SEQ ID NO: 201 - DNA, 11 bp, synthetic construct
  misc_feature 1..11: note = cis-acting regulatory element for use in chimeric regulatoryelements
  source 1..11: mol_type = other DNA
tatttgcttaa

SEQ ID NO: 202 - skipped

SEQ ID NO: 203 - DNA, 12 bp, synthetic construct
  misc_feature 1..12: note = cis-acting regulatory element for use in chimeric regulatoryelements
  source 1..12: mol_type = other DNA
ggattttacagt

SEQ ID NO: 204-205 - skipped (2 entries)

SEQ ID NO: 206 - DNA, 11 bp, synthetic construct
  misc_feature 1..11: note = cis-acting regulatory element for use in chimeric regulatoryelements
  source 1..11: mol_type = other DNA
ccttttgtctc

SEQ ID NO: 207-217 - skipped (11 entries)

SEQ ID NO: 218 - DNA, 28 bp, synthetic construct
  misc_feature 1..28: note = cis-acting regulatory element for use in chimeric regulatoryelements
  source 1..28: mol_type = other DNA
ggattcaaggggcatgtatcttgaatcc

SEQ ID NO: 219 - DNA, 24 bp, synthetic construct
  misc_feature 1..24: note = cis-acting regulatory element for use in chimeric regulatoryelements
  source 1..24: mol_type = other DNA
gatatattaatattttattttata

SEQ ID NO: 220 - DNA, 16 bp, synthetic construct
  misc_feature 1..16: note = cis-acting regulatory element for use in chimeric regulatoryelements
  source 1..16: mol_type = other DNA
cttaaattatttattt

SEQ ID NO: 221 - DNA, 17 bp, synthetic construct
  misc_feature 1..17: note = cis-acting regulatory element for use in chimeric regulatoryelements
  source 1..17: mol_type = other DNA
ctccaacaaaccccttc

SEQ ID NO: 222 - DNA, 14 bp, synthetic construct
  misc_feature 1..14: note = cis-acting regulatory element for use in chimeric regulatoryelements
  source 1..14: mol_type = other DNA
attctcacctacca

SEQ ID NO: 223-226 - skipped (4 entries)

SEQ ID NO: 227 - DNA, 11 bp, synthetic construct
  misc_feature 1..11: note = cis-acting regulatory element for use in chimeric regulatoryelements
  source 1..11: mol_type = other DNA
taagagccgcc

SEQ ID NO: 228 - skipped

SEQ ID NO: 229 - DNA, 14 bp, synthetic construct
  misc_feature 1..14: note = cis-acting regulatory element for use in chimeric regulatoryelements
  source 1..14: mol_type = other DNA
acatgtcatcatgt

SEQ ID NO: 230-231 - skipped (2 entries)

SEQ ID NO: 232 - DNA, 16 bp, synthetic construct
  misc_feature 1..16: note = cis-acting regulatory element for use in chimeric regulatoryelements
  source 1..16: mol_type = other DNA
gagagagagagagaga

SEQ ID NO: 233 - DNA, 18 bp, synthetic construct
  misc_feature 1..18: note = cis-acting regulatory element for use in chimeric regulatoryelements
  source 1..18: mol_type = other DNA
gagagagagagagagaga

SEQ ID NO: 234 - skipped

SEQ ID NO: 235 - DNA, 14 bp, synthetic construct
  misc_feature 1..14: note = cis-acting regulatory element for use in chimeric regulatoryelements
  source 1..14: mol_type = other DNA
rtaacarantcygg

SEQ ID NO: 236 - skipped

SEQ ID NO: 237 - DNA, 15 bp, synthetic construct
  misc_feature 1..15: note = cis-acting regulatory element for use in chimeric regulatoryelements
  source 1..15: mol_type = other DNA
gtaacagaatgctgg

SEQ ID NO: 238 - skipped

SEQ ID NO: 239 - DNA, 21 bp, synthetic construct
  misc_feature 1..21: note = cis-acting regulatory element for use in chimeric regulatoryelements
  source 1..21: mol_type = other DNA
ggccgataacaaactccggcc

SEQ ID NO: 240 - skipped

SEQ ID NO: 241 - DNA, 10 bp, synthetic construct
  misc_feature 1..10: note = cis-acting regulatory element for use in chimeric regulatoryelements
  source 1..10: mol_type = other DNA
gccacgtgcc

SEQ ID NO: 242 - skipped

SEQ ID NO: 243 - DNA, 10 bp, synthetic construct
  misc_feature 1..10: note = cis-acting regulatory element for use in chimeric regulatoryelements
  source 1..10: mol_type = other DNA
accacgtggc

SEQ ID NO: 244 - DNA, 11 bp, synthetic construct
  misc_feature 1..11: note = cis-acting regulatory element for use in chimeric regulatoryelements
  source 1..11: mol_type = other DNA
ctacgtggcca

SEQ ID NO: 245 - DNA, 10 bp, synthetic construct
  misc_feature 1..10: note = cis-acting regulatory element for use in chimeric regulatoryelements
  source 1..10: mol_type = other DNA
tccacgtggt

SEQ ID NO: 246 - DNA, 10 bp, synthetic construct
  misc_feature 1..10: note = cis-acting regulatory element for use in chimeric regulatoryelements
  source 1..10: mol_type = other DNA
gcaacgcaac

SEQ ID NO: 247-251 - skipped (5 entries)

SEQ ID NO: 252 - DNA, 12 bp, synthetic construct
  misc_feature 1..12: note = cis-acting regulatory element for use in chimeric regulatoryelements
  source 1..12: mol_type = other DNA
aacaaactctat

SEQ ID NO: 253 - DNA, 18 bp, synthetic construct
  misc_feature 1..18: note = cis-acting regulatory element for use in chimeric regulatoryelements
  source 1..18: mol_type = other DNA
atatcatgagtcacttca

SEQ ID NO: 254 - DNA, 19 bp, synthetic construct
  misc_feature 1..19: note = cis-acting regulatory element for use in chimeric regulatoryelements
  source 1..19: mol_type = other DNA
tatctagtgagtcacttca

SEQ ID NO: 255 - DNA, 11 bp, synthetic construct
  misc_feature 1..11: note = cis-acting regulatory element for use in chimeric regulatoryelements
  source 1..11: mol_type = other DNA
tccgtgtacca

SEQ ID NO: 256 - DNA, 15 bp, synthetic construct
  misc_feature 1..15: note = cis-acting regulatory element for use in chimeric regulatoryelements
  source 1..15: mol_type = other DNA
cttttgtgtacctta

SEQ ID NO: 257 - DNA, 14 bp, synthetic construct
  misc_feature 1..14: note = cis-acting regulatory element for use in chimeric regulatoryelements
  source 1..14: mol_type = other DNA
aagcaacacacaac

SEQ ID NO: 258 - DNA, 19 bp, synthetic construct
  misc_feature 1..19: note = cis-acting regulatory element for use in chimeric regulatoryelements
  source 1..19: mol_type = other DNA
atgctcaatagatataagt

SEQ ID NO: 259 - DNA, 11 bp, synthetic construct
  misc_feature 1..11: note = cis-acting regulatory element for use in chimeric regulatoryelements
  source 1..11: mol_type = other DNA
ctttcgtgtac

SEQ ID NO: 260 - DNA, 10 bp, synthetic construct
  misc_feature 1..10: note = cis-acting regulatory element for use in chimeric regulatoryelements
  source 1..10: mol_type = other DNA
cattaattag

SEQ ID NO: 261 - DNA, 12 bp, synthetic construct
  misc_feature 1..12: note = cis-acting regulatory element for use in chimeric regulatoryelements
  source 1..12: mol_type = other DNA
cactggccgccc

SEQ ID NO: 262 - skipped

SEQ ID NO: 263 - DNA, 24 bp, synthetic construct
  misc_feature 1..24: note = cis-acting regulatory element for use in chimeric regulatoryelements
  source 1..24: mol_type = other DNA
tggcggctcttatctcacgtgatg

SEQ ID NO: 264-266 - skipped (3 entries)

SEQ ID NO: 267 - DNA, 12 bp, synthetic construct
  misc_feature 1..12: note = cis-acting regulatory element for use in chimeric regulatoryelements
  source 1..12: mol_type = other DNA
kwgtgrwaawrw

SEQ ID NO: 268-271 - skipped (4 entries)

SEQ ID NO: 272 - DNA, 11 bp, synthetic construct
  misc_feature 1..11: note = cis-acting regulatory element for use in chimeric regulatoryelements
  source 1..11: mol_type = other DNA
ctaattgttta

SEQ ID NO: 273 - skipped

SEQ ID NO: 274 - DNA, 11 bp, synthetic construct
  misc_feature 1..11: note = cis-acting regulatory element for use in chimeric regulatoryelements
  source 1..11: mol_type = other DNA
gtaatsattac

SEQ ID NO: 275-277 - skipped (3 entries)

SEQ ID NO: 278 - DNA, 14 bp, synthetic construct
  misc_feature 1..14: note = cis-acting regulatory element for use in chimeric regulatoryelements
  source 1..14: mol_type = other DNA
ctngaannttcnag

SEQ ID NO: 279 - skipped

SEQ ID NO: 280 - DNA, 10 bp, synthetic construct
  misc_feature 1..10: note = cis-acting regulatory element for use in chimeric regulatoryelements
  source 1..10: mol_type = other DNA
aggaattcct

SEQ ID NO: 281 - DNA, 12 bp, synthetic construct
  misc_feature 1..12: note = cis-acting regulatory element for use in chimeric regulatoryelements
  source 1..12: mol_type = other DNA
caaaattttgta

SEQ ID NO: 282 - DNA, 12 bp, synthetic construct
  misc_feature 1..12: note = cis-acting regulatory element for use in chimeric regulatoryelements
  source 1..12: mol_type = other DNA
tgacacgtggca

SEQ ID NO: 283-285 - skipped (3 entries)

SEQ ID NO: 286 - DNA, 13 bp, synthetic construct
  misc_feature 1..13: note = cis-acting regulatory element for use in chimeric regulatoryelements
  source 1..13: mol_type = other DNA
agatatgataaaa

SEQ ID NO: 287 - DNA, 18 bp, synthetic construct
  misc_feature 1..18: note = cis-acting regulatory element for use in chimeric regulatoryelements
  source 1..18: mol_type = other DNA
atcaagcatgcttcttgc

SEQ ID NO: 288 - DNA, 27 bp, synthetic construct
  misc_feature 1..27: note = cis-acting regulatory element for use in chimeric regulatoryelements
  source 1..27: mol_type = other DNA
ttgaacggcaagtttcacgctgtcact

SEQ ID NO: 289 - DNA, 14 bp, synthetic construct
  misc_feature 1..14: note = cis-acting regulatory element for use in chimeric regulatoryelements
  source 1..14: mol_type = other DNA
cacgagscckccac

SEQ ID NO: 290-293 - skipped (4 entries)

SEQ ID NO: 294 - DNA, 10 bp, synthetic construct
  misc_feature 1..10: note = cis-acting regulatory element for use in chimeric regulatoryelements
  source 1..10: mol_type = other DNA
cgtcaatgaa

SEQ ID NO: 295 - DNA, 13 bp, synthetic construct
  misc_feature 1..13: note = cis-acting regulatory element for use in chimeric regulatoryelements
  source 1..13: mol_type = other DNA
catacgtcgtcaa

SEQ ID NO: 296 - DNA, 24 bp, synthetic construct
  misc_feature 1..24: note = cis-acting regulatory element for use in chimeric regulatoryelements
  source 1..24: mol_type = other DNA
ctcttagaccgccttctttgaaag

SEQ ID NO: 297 - skipped

SEQ ID NO: 298 - DNA, 12 bp, synthetic construct
  misc_feature 1..12: note = cis-acting regulatory element for use in chimeric regulatoryelements
  source 1..12: mol_type = other DNA
attcacctaccc

SEQ ID NO: 299 - DNA, 12 bp, synthetic construct
  misc_feature 1..12: note = cis-acting regulatory element for use in chimeric regulatoryelements
  source 1..12: mol_type = other DNA
aatctccaacca

SEQ ID NO: 300 - DNA, 11 bp, synthetic construct
  misc_feature 1..11: note = cis-acting regulatory element for use in chimeric regulatoryelements
  source 1..11: mol_type = other DNA
aaattaaccaa

SEQ ID NO: 301-302 - skipped (2 entries)

SEQ ID NO: 303 - DNA, 28 bp, synthetic construct
  misc_feature 1..28: note = cis-acting regulatory element for use in chimeric regulatoryelements
  source 1..28: mol_type = other DNA
tccatagccatgcawrctgmagaatgtc

SEQ ID NO: 304 - DNA, 15 bp, synthetic construct
  misc_feature 1..15: note = cis-acting regulatory element for use in chimeric regulatoryelements
  source 1..15: mol_type = other DNA
tgtgtggttaatatg

SEQ ID NO: 305 - DNA, 15 bp, synthetic construct
  misc_feature 1..15: note = cis-acting regulatory element for use in chimeric regulatoryelements
  source 1..15: mol_type = other DNA
actattttcactatc

SEQ ID NO: 306 - DNA, 10 bp, synthetic construct
  misc_feature 1..10: note = cis-acting regulatory element for use in chimeric regulatoryelements
  source 1..10: mol_type = other DNA
tccacgtggc

SEQ ID NO: 307 - DNA, 10 bp, synthetic construct
  misc_feature 1..10: note = cis-acting regulatory element for use in chimeric regulatoryelements
  source 1..10: mol_type = other DNA
aacctaacct

SEQ ID NO: 308 - skipped

SEQ ID NO: 309 - DNA, 10 bp, synthetic construct
  misc_feature 1..10: note = cis-acting regulatory element for use in chimeric regulatoryelements
  source 1..10: mol_type = other DNA
tctacgtcac

SEQ ID NO: 310 - DNA, 10 bp, synthetic construct
  misc_feature 1..10: note = cis-acting regulatory element for use in chimeric regulatoryelements
  source 1..10: mol_type = other DNA
acgtcataga

SEQ ID NO: 311-313 - skipped (3 entries)

SEQ ID NO: 314 - DNA, 10 bp, synthetic construct
  misc_feature 1..10: note = cis-acting regulatory element for use in chimeric regulatoryelements
  source 1..10: mol_type = other DNA
aataaayaaa

SEQ ID NO: 315 - DNA, 11 bp, synthetic construct
  misc_feature 1..11: note = cis-acting regulatory element for use in chimeric regulatoryelements
  source 1..11: mol_type = other DNA
wtttatrtttw

SEQ ID NO: 316 - DNA, 25 bp, synthetic construct
  misc_feature 1..25: note = cis-acting regulatory element for use in chimeric regulatoryelements
  source 1..25: mol_type = other DNA
tgtttwtgntttccgaaannnnwww

SEQ ID NO: 317 - DNA, 10 bp, synthetic construct
  misc_feature 1..10: note = cis-acting regulatory element for use in chimeric regulatoryelements
  source 1..10: mol_type = other DNA
ttwtwttwtt

SEQ ID NO: 318 - DNA, 17 bp, synthetic construct
  misc_feature 1..17: note = cis-acting regulatory element for use in chimeric regulatoryelements
  source 1..17: mol_type = other DNA
gatacannaatntgatg

SEQ ID NO: 319 - skipped

SEQ ID NO: 320 - DNA, 12 bp, synthetic construct
  misc_feature 1..12: note = cis-acting regulatory element for use in chimeric regulatoryelements
  source 1..12: mol_type = other DNA
tctaacctacca

SEQ ID NO: 321 - DNA, 10 bp, synthetic construct
  misc_feature 1..10: note = cis-acting regulatory element for use in chimeric regulatoryelements
  source 1..10: mol_type = other DNA
aatggaaatg

SEQ ID NO: 322-340 - skipped (19 entries)

SEQ ID NO: 341 - DNA, 30 bp, synthetic construct
  misc_feature 1..30: note = cis-acting regulatory element for use in chimeric regulatoryelements
  source 1..30: mol_type = other DNA
ccatatgccatgtctctcaattggtcccat

SEQ ID NO: 342-347 - skipped (6 entries)

SEQ ID NO: 348 - DNA, 10 bp, synthetic construct
  misc_feature 1..10: note = cis-acting regulatory element for use in chimeric regulatoryelements
  source 1..10: mol_type = other DNA
tccacgtcga

SEQ ID NO: 349 - DNA, 10 bp, synthetic construct
  misc_feature 1..10: note = cis-acting regulatory element for use in chimeric regulatoryelements
  source 1..10: mol_type = other DNA
gccacctcat

SEQ ID NO: 350 - DNA, 10 bp, synthetic construct
  misc_feature 1..10: note = cis-acting regulatory element for use in chimeric regulatoryelements
  source 1..10: mol_type = other DNA
tccacgtact

SEQ ID NO: 351 - DNA, 26 bp, synthetic construct
  misc_feature 1..26: note = cis-acting regulatory element for use in chimeric regulatoryelements
  source 1..26: mol_type = other DNA
atcttatgtcattgatgacgacctcc

SEQ ID NO: 352 - DNA, 11 bp, synthetic construct
  misc_feature 1..11: note = cis-acting regulatory element for use in chimeric regulatoryelements
  source 1..11: mol_type = other DNA
tacacttttgg

SEQ ID NO: 353 - DNA, 30 bp, synthetic construct
  misc_feature 1..30: note = cis-acting regulatory element for use in chimeric regulatoryelements
  source 1..30: mol_type = other DNA
gatccgcgnnnnnnnnnnnnnnaccaatcs

SEQ ID NO: 354 - DNA, 11 bp, synthetic construct
  misc_feature 1..11: note = cis-acting regulatory element for use in chimeric regulatoryelements
  source 1..11: mol_type = other DNA
tcacgcggatc

SEQ ID NO: 355 - DNA, 18 bp, synthetic construct
  misc_feature 1..18: note = cis-acting regulatory element for use in chimeric regulatoryelements
  source 1..18: mol_type = other DNA
ccacgtcancgatccgcg

SEQ ID NO: 356 - DNA, 20 bp, synthetic construct
  misc_feature 1..20: note = cis-acting regulatory element for use in chimeric regulatoryelements
  source 1..20: mol_type = other DNA
tgacgyaagsrmtkacgymm

SEQ ID NO: 357 - DNA, 16 bp, synthetic construct
  misc_feature 1..16: note = cis-acting regulatory element for use in chimeric regulatoryelements
  source 1..16: mol_type = other DNA
acgtaagcgcttacgt

SEQ ID NO: 358 - DNA, 24 bp, synthetic construct
  misc_feature 1..24: note = cis-acting regulatory element for use in chimeric regulatoryelements
  source 1..24: mol_type = other DNA
cggtttacgtaatctcttacatca

SEQ ID NO: 359 - DNA, 20 bp, synthetic construct
  misc_feature 1..20: note = cis-acting regulatory element for use in chimeric regulatoryelements
  source 1..20: mol_type = other DNA
tgatgtaagagattacgtaa

SEQ ID NO: 360-361 - skipped (2 entries)

SEQ ID NO: 362 - DNA, 10 bp, synthetic construct
  misc_feature 1..10: note = cis-acting regulatory element for use in chimeric regulatoryelements
  source 1..10: mol_type = other DNA
tccacgtaga

SEQ ID NO: 363 - DNA, 10 bp, synthetic construct
  misc_feature 1..10: note = cis-acting regulatory element for use in chimeric regulatoryelements
  source 1..10: mol_type = other DNA
gatgayrtgg

SEQ ID NO: 364-367 - skipped (4 entries)

SEQ ID NO: 368 - DNA, 11 bp, synthetic construct
  misc_feature 1..11: note = cis-acting regulatory element for use in chimeric regulatoryelements
  source 1..11: mol_type = other DNA
ycyyaccwacc

SEQ ID NO: 369 - DNA, 14 bp, synthetic construct
  misc_feature 1..14: note = cis-acting regulatory element for use in chimeric regulatoryelements
  source 1..14: mol_type = other DNA
ytyymmcmamcmmc

SEQ ID NO: 370 - skipped

SEQ ID NO: 371 - DNA, 20 bp, synthetic construct
  misc_feature 1..20: note = cis-acting regulatory element for use in chimeric regulatoryelements
  source 1..20: mol_type = other DNA
ttacgcaagcaatgacatct

SEQ ID NO: 372 - DNA, 22 bp, synthetic construct
  misc_feature 1..22: note = cis-acting regulatory element for use in chimeric regulatoryelements
  source 1..22: mol_type = other DNA
gaaatagcaaatgttaaaaata

SEQ ID NO: 373 - skipped

SEQ ID NO: 374 - DNA, 31 bp, synthetic construct
  misc_feature 1..31: note = cis-acting regulatory element for use in chimeric regulatoryelements
  source 1..31: mol_type = other DNA
cagctcccatggctctcccatccgcgccggt

SEQ ID NO: 375 - skipped

SEQ ID NO: 376 - DNA, 20 bp, synthetic construct
  misc_feature 1..20: note = cis-acting regulatory element for use in chimeric regulatoryelements
  source 1..20: mol_type = other DNA
ttggttttgatcaaaaccaa

SEQ ID NO: 377-381 - skipped (5 entries)

SEQ ID NO: 382 - DNA, 11 bp, synthetic construct
  misc_feature 1..11: note = cis-acting regulatory element for use in chimeric regulatoryelements
  source 1..11: mol_type = other DNA
taaragccgcc

SEQ ID NO: 383-384 - skipped (2 entries)

SEQ ID NO: 385 - DNA, 12 bp, synthetic construct
  misc_feature 1..12: note = cis-acting regulatory element for use in chimeric regulatoryelements
  source 1..12: mol_type = other DNA
accggcccactt

SEQ ID NO: 386 - DNA, 15 bp, synthetic construct
  misc_feature 1..15: note = cis-acting regulatory element for use in chimeric regulatoryelements
  source 1..15: mol_type = other DNA
cacatgtgtaaaggt

SEQ ID NO: 387-388 - skipped (2 entries)

SEQ ID NO: 389 - DNA, 32 bp, synthetic construct
  misc_feature 1..32: note = cis-acting regulatory element for use in chimeric regulatoryelements
  source 1..32: mol_type = other DNA
tcggccactatttctacgggcagccagacaaa

SEQ ID NO: 390-395 - skipped (6 entries)

SEQ ID NO: 396 - DNA, 14 bp, synthetic construct
  misc_feature 1..14: note = cis-acting regulatory element for use in chimeric regulatoryelements
  source 1..14: mol_type = other DNA
gtgtggttaatatg

SEQ ID NO: 397 - DNA, 12 bp, synthetic construct
  misc_feature 1..12: note = cis-acting regulatory element for use in chimeric regulatoryelements
  source 1..12: mol_type = other DNA
atcattttcact

SEQ ID NO: 398 - skipped

SEQ ID NO: 399 - DNA, 11 bp, synthetic construct
  misc_feature 1..11: note = cis-acting regulatory element for use in chimeric regulatoryelements
  source 1..11: mol_type = other DNA
cacatggcact

SEQ ID NO: 400 - DNA, 11 bp, synthetic construct
  misc_feature 1..11: note = cis-acting regulatory element for use in chimeric regulatoryelements
  source 1..11: mol_type = other DNA
tccaacttgga

SEQ ID NO: 401 - DNA, 11 bp, synthetic construct
  misc_feature 1..11: note = cis-acting regulatory element for use in chimeric regulatoryelements
  source 1..11: mol_type = other DNA
catgggcgcgg

SEQ ID NO: 402-403 - skipped (2 entries)

SEQ ID NO: 404 - DNA, 16 bp, synthetic construct
  misc_feature 1..16: note = cis-acting regulatory element for use in chimeric regulatoryelements
  source 1..16: mol_type = other DNA
cggcggcctcgccacg

SEQ ID NO: 405-406 - skipped (2 entries)

SEQ ID NO: 407 - DNA, 11 bp, synthetic construct
  misc_feature 1..11: note = cis-acting regulatory element for use in chimeric regulatoryelements
  source 1..11: mol_type = other DNA
gatcatcgatc

SEQ ID NO: 408 - DNA, 15 bp, synthetic construct
  misc_feature 1..15: note = cis-acting regulatory element for use in chimeric regulatoryelements
  source 1..15: mol_type = other DNA
ccagtgtgcccctgg

SEQ ID NO: 409 - skipped

SEQ ID NO: 410 - DNA, 12 bp, synthetic construct
  misc_feature 1..12: note = cis-acting regulatory element for use in chimeric regulatoryelements
  source 1..12: mol_type = other DNA
caactttcatat

SEQ ID NO: 411 - DNA, 26 bp, synthetic construct
  misc_feature 1..26: note = cis-acting regulatory element for use in chimeric regulatoryelements
  source 1..26: mol_type = other DNA
catccaactttcatatccatgtgctt

SEQ ID NO: 412 - DNA, 17 bp, synthetic construct
  misc_feature 1..17: note = cis-acting regulatory element for use in chimeric regulatoryelements
  source 1..17: mol_type = other DNA
caaactcgtatatccat

SEQ ID NO: 413 - DNA, 13 bp, synthetic construct
  misc_feature 1..13: note = cis-acting regulatory element for use in chimeric regulatoryelements
  source 1..13: mol_type = other DNA
tccatgcatgcac

SEQ ID NO: 414-420 - skipped (7 entries)

SEQ ID NO: 421 - DNA, 21 bp, synthetic construct
  misc_feature 1..21: note = cis-acting regulatory element for use in chimeric regulatoryelements
  source 1..21: mol_type = other DNA
ctgacgtaagggatgacgcac

SEQ ID NO: 422 - DNA, 16 bp, synthetic construct
  misc_feature 1..16: note = cis-acting regulatory element for use in chimeric regulatoryelements
  source 1..16: mol_type = other DNA
cactaacacaaagtaa

SEQ ID NO: 423 - DNA, 15 bp, synthetic construct
  misc_feature 1..15: note = cis-acting regulatory element for use in chimeric regulatoryelements
  source 1..15: mol_type = other DNA
ttatgaacagtaatt

SEQ ID NO: 424 - skipped

SEQ ID NO: 425 - DNA, 24 bp, synthetic construct
  misc_feature 1..24: note = cis-acting regulatory element for use in chimeric regulatoryelements
  source 1..24: mol_type = other DNA
ataatgggccacactgtggggcat

SEQ ID NO: 426 - DNA, 24 bp, synthetic construct
  misc_feature 1..24: note = cis-acting regulatory element for use in chimeric regulatoryelements
  source 1..24: mol_type = other DNA
ttnnngtagctagtgtatttgtat

SEQ ID NO: 427-430 - skipped (4 entries)

SEQ ID NO: 431 - DNA, 10 bp, synthetic construct
  misc_feature 1..10: note = cis-acting regulatory element for use in chimeric regulatoryelements
  source 1..10: mol_type = other DNA
tccacgtgtc

SEQ ID NO: 432 - DNA, 14 bp, synthetic construct
  misc_feature 1..14: note = cis-acting regulatory element for use in chimeric regulatoryelements
  source 1..14: mol_type = other DNA
tcatggtaacaatt

SEQ ID NO: 433 - DNA, 14 bp, synthetic construct
  misc_feature 1..14: note = cis-acting regulatory element for use in chimeric regulatoryelements
  source 1..14: mol_type = other DNA
agttagttaaaaga

SEQ ID NO: 434-445 - skipped (12 entries)

SEQ ID NO: 446 - DNA, 10 bp, synthetic construct
  misc_feature 1..10: note = cis-acting regulatory element for use in chimeric regulatoryelements
  source 1..10: mol_type = other DNA
ttgcatgact

SEQ ID NO: 447-449 - skipped (3 entries)

SEQ ID NO: 450 - DNA, 11 bp, synthetic construct
  misc_feature 1..11: note = cis-acting regulatory element for use in chimeric regulatoryelements
  source 1..11: mol_type = other DNA
cgtccatgcat

SEQ ID NO: 451 - skipped

SEQ ID NO: 452 - DNA, 13 bp, synthetic construct
  misc_feature 1..13: note = cis-acting regulatory element for use in chimeric regulatoryelements
  source 1..13: mol_type = other DNA
tggtaggtgagat

SEQ ID NO: 453-454 - skipped (2 entries)

SEQ ID NO: 455 - DNA, 25 bp, synthetic construct
  misc_feature 1..25: note = cis-acting regulatory element for use in chimeric regulatoryelements
  source 1..25: mol_type = other DNA
aaaactaagaaagaccgatggaaaa

SEQ ID NO: 456-459 - skipped (4 entries)

SEQ ID NO: 460 - DNA, 14 bp, synthetic construct
  misc_feature 1..14: note = cis-acting regulatory element for use in chimeric regulatoryelements
  source 1..14: mol_type = other DNA
actctacagtactc

SEQ ID NO: 461 - DNA, 10 bp, synthetic construct
  misc_feature 1..10: note = cis-acting regulatory element for use in chimeric regulatoryelements
  source 1..10: mol_type = other DNA
ctataaatac

SEQ ID NO: 462-471 - skipped (10 entries)

SEQ ID NO: 472 - DNA, 10 bp, synthetic construct
  misc_feature 1..10: note = cis-acting regulatory element for use in chimeric regulatoryelements
  source 1..10: mol_type = other DNA
tcatcttctt

SEQ ID NO: 473 - DNA, 12 bp, synthetic construct
  misc_feature 1..12: note = cis-acting regulatory element for use in chimeric regulatoryelements
  source 1..12: mol_type = other DNA
tgactttctgac

SEQ ID NO: 474 - skipped

SEQ ID NO: 475 - DNA, 24 bp, synthetic construct
  misc_feature 1..24: note = cis-acting regulatory element for use in chimeric regulatoryelements
  source 1..24: mol_type = other DNA
acaggggcataatggtaatttaaa

SEQ ID NO: 476 - DNA, 16 bp, synthetic construct
  misc_feature 1..16: note = cis-acting regulatory element for use in chimeric regulatoryelements
  source 1..16: mol_type = other DNA
aggggcataatggtaa

SEQ ID NO: 477 - skipped

SEQ ID NO: 478 - DNA, 16 bp, synthetic construct
  misc_feature 1..16: note = cis-acting regulatory element for use in chimeric regulatoryelements
  source 1..16: mol_type = other DNA
cgtcatcgagatgacg

SEQ ID NO: 479-480 - skipped (2 entries)

SEQ ID NO: 481 - DNA, 11 bp, synthetic construct
  misc_feature 1..11: note = cis-acting regulatory element for use in chimeric regulatoryelements
  source 1..11: mol_type = other DNA
ctgaagaagaa

SEQ ID NO: 482 - DNA, 15 bp, synthetic construct
  misc_feature 1..15: note = cis-acting regulatory element for use in chimeric regulatoryelements
  source 1..15: mol_type = other DNA
gtnwayattnatnng

SEQ ID NO: 483-484 - skipped (2 entries)

SEQ ID NO: 485 - DNA, 12 bp, synthetic construct
  misc_feature 1..12: note = cis-acting regulatory element for use in chimeric regulatoryelements
  source 1..12: mol_type = other DNA
taaacaatggct

SEQ ID NO: 486-487 - skipped (2 entries)

SEQ ID NO: 488 - DNA, 11 bp, synthetic construct
  misc_feature 1..11: note = cis-acting regulatory element for use in chimeric regulatoryelements
  source 1..11: mol_type = other DNA
attggtccacg

SEQ ID NO: 489 - DNA, 10 bp, synthetic construct
  misc_feature 1..10: note = cis-acting regulatory element for use in chimeric regulatoryelements
  source 1..10: mol_type = other DNA
ccacgtcatc

SEQ ID NO: 490-493 - skipped (4 entries)

SEQ ID NO: 494 - DNA, 20 bp, synthetic construct
  misc_feature 1..20: note = cis-acting regulatory element for use in chimeric regulatoryelements
  source 1..20: mol_type = other DNA
gtacgtgttataaaacgtgt

SEQ ID NO: 495-496 - skipped (2 entries)

SEQ ID NO: 497 - DNA, 14 bp, synthetic construct
  misc_feature 1..14: note = cis-acting regulatory element for use in chimeric regulatoryelements
  source 1..14: mol_type = other DNA
agtcaaaattgacc

SEQ ID NO: 498-500 - skipped (3 entries)

SEQ ID NO: 501 - DNA, 10 bp, synthetic construct
  misc_feature 1..10: note = cis-acting regulatory element for use in chimeric regulatoryelements
  source 1..10: mol_type = other DNA
aagcgtaagt

SEQ ID NO: 502 - DNA, 10 bp, synthetic construct
  misc_feature 1..10: note = cis-acting regulatory element for use in chimeric regulatoryelements
  source 1..10: mol_type = other DNA
aawgtatcsa

SEQ ID NO: 503-505 - skipped (3 entries)

SEQ ID NO: 506 - DNA, 26 bp, synthetic construct
  misc_feature 1..26: note = cis-acting regulatory element for use in chimeric regulatoryelements
  source 1..26: mol_type = other DNA
tgtgacattgaaattctttgacttta

SEQ ID NO: 507 - skipped

SEQ ID NO: 508 - DNA, 20 bp, Glycine max
  source 1..20: mol_type = genomic DNA
tgacgtaagcaaggacgtca

SEQ ID NO: 509 - DNA, 20 bp, Glycine max
  source 1..20: mol_type = genomic DNA
aaacgtaatccatgacgtct

SEQ ID NO: 510 - DNA, 20 bp, Glycine max
  source 1..20: mol_type = genomic DNA
tgacgtaagccactacgtgc

SEQ ID NO: 511 - DNA, 20 bp, Glycine max
  source 1..20: mol_type = genomic DNA
tgacgtattccatgacgtat

SEQ ID NO: 512 - DNA, 20 bp, Glycine max
  source 1..20: mol_type = genomic DNA
ttacgtaagtcgtgacgtct

SEQ ID NO: 513 - DNA, 20 bp, Glycine max
  source 1..20: mol_type = genomic DNA
tgacgtaagcagagacgtat

SEQ ID NO: 514 - DNA, 20 bp, Glycine max
  source 1..20: mol_type = genomic DNA
ttacgtttgccattacgtct

SEQ ID NO: 515 - DNA, 20 bp, Glycine max
  source 1..20: mol_type = genomic DNA
tgacgtatgctattacgcct

SEQ ID NO: 516 - DNA, 29 bp, Glycine max
  source 1..29: mol_type = genomic DNA
aagataagataataatgttgaagataaga

SEQ ID NO: 517 - DNA, 29 bp, Glycine max
  source 1..29: mol_type = genomic DNA
aagataagataaaagatttaaagataaga

SEQ ID NO: 518 - DNA, 29 bp, Glycine max
  source 1..29: mol_type = genomic DNA
aagataagagattaaagtaaaagataaga

SEQ ID NO: 519 - DNA, 29 bp, Glycine max
  source 1..29: mol_type = genomic DNA
aagataagataaaaaagtaaaagataaga

SEQ ID NO: 520 - DNA, 24 bp, Glycine max
  source 1..24: mol_type = genomic DNA
aagataagaaagtaaaagataaga

SEQ ID NO: 521 - DNA, 35 bp, Glycine max
  source 1..35: mol_type = genomic DNA
atgagatgatattaatgttgatgataatgttgaga

SEQ ID NO: 522 - DNA, 35 bp, synthetic construct
  misc_feature 1..35: note = SY-MMV1-V01 cis-regulatory element
  source 1..35: mol_type = other DNA
aagaaaaaataataagaatgcaaagaagagtagga

SEQ ID NO: 523 - DNA, 29 bp, synthetic construct
  misc_feature 1..29: note = SY-MMV1-V01cis-regulatory element
  source 1..29: mol_type = other DNA
aagataagataataatgatgaagataaga

SEQ ID NO: 524 - DNA, 29 bp, synthetic construct
  misc_feature 1..29: note = SY-MMV1-V03 cis-regulatory element
  source 1..29: mol_type = other DNA
aagataagataataatgataaagataaga

SEQ ID NO: 525 - DNA, 29 bp, Pisum sativum
  source 1..29: mol_type = genomic DNA
aagataagataataatgtagaagataaga

SEQ ID NO: 526 - DNA, 17 bp, Glycine max
  source 1..17: mol_type = genomic DNA
ttgatctagtagataaa

SEQ ID NO: 527 - DNA, 17 bp, Glycine max
  source 1..17: mol_type = genomic DNA
ttgatctagtatataaa

SEQ ID NO: 528 - DNA, 17 bp, Glycine max
  source 1..17: mol_type = genomic DNA
ttgatctagtagttaaa

SEQ ID NO: 529 - DNA, 17 bp, Glycine max
  source 1..17: mol_type = genomic DNA
gtgatctactagataaa

SEQ ID NO: 530 - DNA, 17 bp, Glycine max
  source 1..17: mol_type = genomic DNA
ttgatgtagtagataat

SEQ ID NO: 531 - DNA, 17 bp, Aglaonema bacilliform virus
  source 1..17: mol_type = genomic DNA
atgatctagaagataaa

SEQ ID NO: 532 - DNA, 20 bp, Aglaonema bacilliform virus
  source 1..20: mol_type = genomic DNA
tgaagaaaacccttatgtgg

SEQ ID NO: 533 - DNA, 20 bp, Bougianvillea chlorotic vein banding virus
  source 1..20: mol_type = genomic DNA
tacgtaaactcctaagccgt

SEQ ID NO: 534 - DNA, 20 bp, Commelina sp.
  source 1..20: mol_type = genomic DNA
tgacggatgcaatgacgtca

SEQ ID NO: 535 - DNA, 22 bp, Gooseberry vein banding associated virus
  source 1..22: mol_type = genomic DNA
tgattcgtcatcgcttacgcca

SEQ ID NO: 536 - DNA, 20 bp, Grapevine clearning virus
  source 1..20: mol_type = genomic DNA
tgacgtaagcaatgacgact

SEQ ID NO: 537 - DNA, 20 bp, Dahlia mosaic virus
  source 1..20: mol_type = genomic DNA
agacgtcagcagtgacgaac

SEQ ID NO: 538 - DNA, 20 bp, Dahlia mosaic Virus
  source 1..20: mol_type = genomic DNA
aaacgtcagcaatgacgtca

SEQ ID NO: 539 - DNA, 20 bp, Eupatorium vein-clearing virus
  source 1..20: mol_type = genomic DNA
aaacgtcatccatgacgttt

SEQ ID NO: 540 - DNA, 20 bp, Rudbeckia flower distortion virus
  source 1..20: mol_type = genomic DNA
agacgtaagccatgacgtca

SEQ ID NO: 541 - DNA, 20 bp, Strawberry vein banding virus
  source 1..20: mol_type = genomic DNA
tgaagataagactgacccca

SEQ ID NO: 542 - DNA, 23 bp, Cassava vein mosaic virus
  source 1..23: mol_type = genomic DNA
tgaagacgtaagcactgacgaca

SEQ ID NO: 543 - DNA, 20 bp, Sweet potato collusive virus
  source 1..20: mol_type = genomic DNA
tgacgcaggcgatgacgtca

SEQ ID NO: 544 - DNA, 20 bp, Petunia vein clearing virus
  source 1..20: mol_type = genomic DNA
tgatgtaagtgcttacgtct

SEQ ID NO: 545 - DNA, 20 bp, Blueberry red ringspot virus
  source 1..20: mol_type = genomic DNA
tgacgtaagtttacacttcg

SEQ ID NO: 546 - DNA, 20 bp, Cestrum yellow leaf curling virus
  source 1..20: mol_type = genomic DNA
tgacgtaagggcttacgaaa

SEQ ID NO: 547 - DNA, 20 bp, Peanut chlorotic streak virus
  source 1..20: mol_type = genomic DNA
tgacgtaagggcttacgcca

SEQ ID NO: 548 - DNA, 20 bp, Soybean chlorotic mottle virus
  source 1..20: mol_type = genomic DNA
tgaacgtcagcaatgacgaa

SEQ ID NO: 549 - DNA, 25 bp, Water chestnut soymovirus 1
  source 1..25: mol_type = genomic DNA
tggagaggaatcagcccgtgacgac

SEQ ID NO: 550 - DNA, 23 bp, synthetic construct
  misc_feature 1..23: note = cis-regulatory element
  source 1..23: mol_type = other DNA
tttatttaccaaacggtaacatc

SEQ ID NO: 551 - DNA, 23 bp, synthetic construct
  misc_feature 1..23: note = cis-regulatory element
  source 1..23: mol_type = other DNA
gacgtgtaaagtaaatttacaac

SEQ ID NO: 552 - DNA, 21 bp, synthetic construct
  misc_feature 1..21: note = cis-regulatory element
  source 1..21: mol_type = other DNA
aaatagataaataaaaacatt

SEQ ID NO: 553 - DNA, 28 bp, synthetic construct
  misc_feature 1..28: note = cis-regulatory element
  source 1..28: mol_type = other DNA
aaaaagtaaaaagtaaaaaagtaaaaag

SEQ ID NO: 554 - DNA, 17 bp, synthetic construct
  misc_feature 1..17: note = cis-regulatory element
  source 1..17: mol_type = other DNA
ttacgcaagcaatgaca

SEQ ID NO: 555 - DNA, 17 bp, synthetic construct
  misc_feature 1..17: note = cis-regulatory element
  source 1..17: mol_type = other DNA
agttgaatgggggtgca

SEQ ID NO: 556 - DNA, 31 bp, synthetic construct; identical to SEQ ID NO: 136
  misc_feature 1..31: note = cis-regulatory element
  source 1..31: mol_type = other DNA

SEQ ID NO: 557 - DNA, 18 bp, synthetic construct
  misc_feature 1..18: note = cis-regulatory element
  source 1..18: mol_type = other DNA
tcccggtacacacttctt

SEQ ID NO: 558 - DNA, 21 bp, synthetic construct
  misc_feature 1..21: note = cis-regulatory element
  source 1..21: mol_type = other DNA
aattccatagaatagataata

SEQ ID NO: 559 - DNA, 16 bp, synthetic construct
  misc_feature 1..16: note = cis-regulatory element
  source 1..16: mol_type = other DNA
tgaaaacagtgagtta

SEQ ID NO: 560 - DNA, 18 bp, synthetic construct
  misc_feature 1..18: note = cis-regulatory element
  source 1..18: mol_type = other DNA
gtttacataaatggaaaa

SEQ ID NO: 561 - DNA, 18 bp, synthetic construct
  misc_feature 1..18: note = cis-regulatory element
  source 1..18: mol_type = other DNA
cttacctttcatggatta

SEQ ID NO: 562 - DNA, 18 bp, synthetic construct
  misc_feature 1..18: note = cis-regulatory element
  source 1..18: mol_type = other DNA
ctttccatttttagtaac

SEQ ID NO: 563 - DNA, 33 bp, synthetic construct; identical to SEQ ID NO: 187
  misc_feature 1..33: note = cis-regulatory element
  source 1..33: mol_type = other DNA

SEQ ID NO: 564 - DNA, 16 bp, synthetic construct
  misc_feature 1..16: note = cis-regulatory element
  source 1..16: mol_type = other DNA
cgtgtcgtccatgcat

SEQ ID NO: 565 - DNA, 28 bp, synthetic construct
  misc_feature 1..28: note = cis-regulatory element
  source 1..28: mol_type = other DNA
ggattcaaggggcatgtatcttgaatcc

SEQ ID NO: 566 - DNA, 24 bp, synthetic construct
  misc_feature 1..24: note = cis-regulatory element
  source 1..24: mol_type = other DNA
gatatattaatattttattttata

SEQ ID NO: 567 - DNA, 16 bp, synthetic construct
  misc_feature 1..16: note = cis-regulatory element
  source 1..16: mol_type = other DNA
cttaaattatttattt

SEQ ID NO: 568 - DNA, 17 bp, synthetic construct
  misc_feature 1..17: note = cis-regulatory element
  source 1..17: mol_type = other DNA
ctccaacaaaccccttc

SEQ ID NO: 569 - DNA, 18 bp, synthetic construct
  misc_feature 1..18: note = cis-regulatory element
  source 1..18: mol_type = other DNA
atatcatgagtcacttca

SEQ ID NO: 570 - DNA, 19 bp, synthetic construct
  misc_feature 1..19: note = cis-regulatory element
  source 1..19: mol_type = other DNA
atgctcaatagatataagt

SEQ ID NO: 571 - DNA, 18 bp, synthetic construct
  misc_feature 1..18: note = cis-regulatory element
  source 1..18: mol_type = other DNA
atcaagcatgcttcttgc

SEQ ID NO: 572 - DNA, 27 bp, synthetic construct
  misc_feature 1..27: note = cis-regulatory element
  source 1..27: mol_type = other DNA
ttgaacggcaagtttcacgctgtcact

SEQ ID NO: 573 - DNA, 31 bp, synthetic construct; identical to SEQ ID NO: 374
  misc_feature 1..31: note = cis-regulatory element
  source 1..31: mol_type = other DNA

SEQ ID NO: 574 - DNA, 20 bp, synthetic construct
  misc_feature 1..20: note = cis-regulatory element
  source 1..20: mol_type = other DNA
ttggttttgatcaaaaccaa

SEQ ID NO: 575 - DNA, 16 bp, synthetic construct
  misc_feature 1..16: note = cis-regulatory element
  source 1..16: mol_type = other DNA
cggcggcctcgccacg

SEQ ID NO: 576 - DNA, 26 bp, synthetic construct
  misc_feature 1..26: note = cis-regulatory element
  source 1..26: mol_type = other DNA
catccaactttcatatccatgtgctt

SEQ ID NO: 577 - DNA, 17 bp, synthetic construct
  misc_feature 1..17: note = cis-regulatory element
  source 1..17: mol_type = other DNA
caaactcgtatatccat

SEQ ID NO: 578 - DNA, 16 bp, synthetic construct
  misc_feature 1..16: note = cis-regulatory element
  source 1..16: mol_type = other DNA
cactaacacaaagtaa

SEQ ID NO: 579 - DNA, 24 bp, synthetic construct
  misc_feature 1..24: note = cis-regulatory element
  source 1..24: mol_type = other DNA
acaggggcataatggtaatttaaa

SEQ ID NO: 580 - DNA, 16 bp, synthetic construct
  misc_feature 1..16: note = cis-regulatory element
  source 1..16: mol_type = other DNA
aggggcataatggtaa

SEQ ID NO: 581 - DNA, 20 bp, synthetic construct
  misc_feature 1..20: note = cis-regulatory element
  source 1..20: mol_type = other DNA
gtacgtgttataaaacgtgt

SEQ ID NO: 582 - DNA, 26 bp, synthetic construct
  misc_feature 1..26: note = cis-regulatory element
  source 1..26: mol_type = other DNA
tgtgacattgaaattctttgacttta

SEQ ID NO: 583 - DNA, 20 bp, Zea mays
  source 1..20: mol_type = genomic DNA
agacgtaggccgtgacgtcg

SEQ ID NO: 584 - DNA, 20 bp, Zea mays
  source 1..20: mol_type = genomic DNA
cgacgtaagcctcgacgtcc

SEQ ID NO: 585 - DNA, 20 bp, Zea mays
  source 1..20: mol_type = genomic DNA
ggacgtaagccatatcgtcg

SEQ ID NO: 586 - DNA, 20 bp, Zea mays
  source 1..20: mol_type = genomic DNA
taacgtaagacatgacgtgt

SEQ ID NO: 587 - DNA, 20 bp, Zea mays
  source 1..20: mol_type = genomic DNA
tgacgtaagccacgcagtct

SEQ ID NO: 588 - DNA, 20 bp, Zea mays
  source 1..20: mol_type = genomic DNA
tgacgtaagccacgcggtct

SEQ ID NO: 589 - DNA, 20 bp, Zea mays
  source 1..20: mol_type = genomic DNA
tgacgtcacccatgacgaca

SEQ ID NO: 590 - DNA, 20 bp, Zea mays
  source 1..20: mol_type = genomic DNA
tgacgtcagcactgacgtca

SEQ ID NO: 591 - DNA, 20 bp, Zea mays
  source 1..20: mol_type = genomic DNA
tgacgtcagccatggaggct

SEQ ID NO: 592 - DNA, 20 bp, Zea mays
  source 1..20: mol_type = genomic DNA
tgacgtcagcgatgacatct

SEQ ID NO: 593 - DNA, 20 bp, Zea mays
  source 1..20: mol_type = genomic DNA
tgacgtctgccatggcgtcc

SEQ ID NO: 594 - DNA, 20 bp, Zea mays
  source 1..20: mol_type = genomic DNA
tgacgtgagccatgtggtca

SEQ ID NO: 595 - DNA, 20 bp, Zea mays
  source 1..20: mol_type = genomic DNA
tgacgtgagtcatgaagtct

SEQ ID NO: 596 - DNA, 20 bp, Zea mays
  source 1..20: mol_type = genomic DNA
tgacgttggccatgtcgtcc

SEQ ID NO: 597 - DNA, 20 bp, Zea mays
  source 1..20: mol_type = genomic DNA
tgaagtcagccatgacgtct

SEQ ID NO: 598 - DNA, 20 bp, Zea mays
  source 1..20: mol_type = genomic DNA
ggaggtaggccatggcgtct

SEQ ID NO: 599 - DNA, 20 bp, Brassica napus
  source 1..20: mol_type = genomic DNA
tgacgtactccatgacgtct

SEQ ID NO: 600 - DNA, 22 bp, Gooseberry Vein Banding Virus
  source 1..22: mol_type = genomic DNA
tgattcgtcatcgcttacgcca

SEQ ID NO: 601 - DNA, 22 bp, Brassica napus
  source 1..22: mol_type = genomic DNA
tgatgcatcatcgcttatgcca

SEQ ID NO: 602 - DNA, 22 bp, Zea mays
  source 1..22: mol_type = genomic DNA
tgatccgtcaacgctaacgcct

SEQ ID NO: 603 - DNA, 22 bp, Zea mays
  source 1..22: mol_type = genomic DNA
tgattcgtcgtcgccgccgcca

SEQ ID NO: 604 - DNA, 22 bp, Zea mays
  source 1..22: mol_type = genomic DNA
tgatccgccatcgcttgcgcct

SEQ ID NO: 605 - DNA, 22 bp, Zea mays
  source 1..22: mol_type = genomic DNA
tgatccgtcaccgctcacgcct

SEQ ID NO: 606 - DNA, 22 bp, Zea mays
  source 1..22: mol_type = genomic DNA
tgatttgtcaacgcggacgcca

SEQ ID NO: 607 - DNA, 22 bp, Zea mays
  source 1..22: mol_type = genomic DNA
tcagtcgtccacgcttacgcca

SEQ ID NO: 608 - DNA, 22 bp, Zea mays
  source 1..22: mol_type = genomic DNA
tgtctagtcatcgcatacgcca

SEQ ID NO: 609 - DNA, 22 bp, Zea mays
  source 1..22: mol_type = genomic DNA
tgagtcttcagcgcctacgcca

SEQ ID NO: 610 - DNA, 22 bp, Zea mays
  source 1..22: mol_type = genomic DNA
tgcttcgtgatcgcttgcgcct

SEQ ID NO: 611 - DNA, 22 bp, Zea mays
  source 1..22: mol_type = genomic DNA
tgattcgtgctcgcttaggccc

SEQ ID NO: 612 - DNA, 22 bp, Zea mays
  source 1..22: mol_type = genomic DNA
tgcttcgtgatcgcttgtgcca

SEQ ID NO: 613 - DNA, 22 bp, Zea mays
  source 1..22: mol_type = genomic DNA
cgattcttcatcacctacgcca

SEQ ID NO: 614 - DNA, 22 bp, Zea mays
  source 1..22: mol_type = genomic DNA
tgattcttcatcgccttcacca

SEQ ID NO: 615 - DNA, 22 bp, Zea mays
  source 1..22: mol_type = genomic DNA
agtttcgtcattgcttacgtca

SEQ ID NO: 616 - DNA, 22 bp, Zea mays
  source 1..22: mol_type = genomic DNA
cgattcgtcatccctttcccca

SEQ ID NO: 617 - DNA, 22 bp, Zea mays
  source 1..22: mol_type = genomic DNA
tgaatcgtgatcggttacacca

SEQ ID NO: 618 - DNA, 22 bp, Zea mays
  source 1..22: mol_type = genomic DNA
tcattcgtcatatcgtacgcca

SEQ ID NO: 619 - DNA, 22 bp, Zea mays
  source 1..22: mol_type = genomic DNA
tgattattcatcgctcacgcga

SEQ ID NO: 620 - DNA, 22 bp, Zea mays
  source 1..22: mol_type = genomic DNA
tcattcttcatcgctttcacca

SEQ ID NO: 621 - DNA, 22 bp, Zea mays
  source 1..22: mol_type = genomic DNA
taattcgtcatcgcttacataa

SEQ ID NO: 622 - DNA, 22 bp, Oryza sativa
  source 1..22: mol_type = genomic DNA
ggagccgtcatcgcctacgcca

SEQ ID NO: 623 - DNA, 22 bp, Oryza sativa
  source 1..22: mol_type = genomic DNA
tgatgcgtcaccgcctgcgcca

SEQ ID NO: 624 - DNA, 22 bp, Sorghum bicolor
  source 1..22: mol_type = genomic DNA
tgattcgtcatcgatgccgccg

SEQ ID NO: 625 - DNA, 22 bp, Zea mays
  source 1..22: mol_type = genomic DNA
agcatcgtcaccgcgtacgcca

SEQ ID NO: 626 - DNA, 22 bp, Zea mays
  source 1..22: mol_type = genomic DNA
ctgttcgtcaacgcgtacgcca

SEQ ID NO: 627 - DNA, 22 bp, Zea mays
  source 1..22: mol_type = genomic DNA
tggctcgtcaccgccgacgcca

SEQ ID NO: 628 - DNA, 22 bp, Zea mays
  source 1..22: mol_type = genomic DNA
tgcttcgccatcgctgacgcgt

SEQ ID NO: 629 - DNA, 22 bp, Brassica napus
  source 1..22: mol_type = genomic DNA
agattcgtcatcgccgactcca

SEQ ID NO: 630 - DNA, 22 bp, Oryza sativa
  source 1..22: mol_type = genomic DNA
tgattcgtcatcgctatcgtct

SEQ ID NO: 631 - DNA, 22 bp, Sorghum bicolor
  source 1..22: mol_type = genomic DNA
taattcgtcatcgcgaacgacg

SEQ ID NO: 632 - DNA, 22 bp, Sorghum bicolor
  source 1..22: mol_type = genomic DNA
tgattcgtcatcgccttcgtat

SEQ ID NO: 633 - DNA, 20 bp, Brassica napus
  source 1..20: mol_type = genomic DNA
tgacgtactccatgacgtct

SEQ ID NO: 634 - DNA, 20 bp, Brassica napus
  source 1..20: mol_type = genomic DNA
tgacgtatgcaaagacgtca

SEQ ID NO: 635 - DNA, 20 bp, Brassica napus
  source 1..20: mol_type = genomic DNA
tgacgtatgcattgacgtca

SEQ ID NO: 636 - DNA, 20 bp, Brassica napus
  source 1..20: mol_type = genomic DNA
tgacgtatgctaagacgtca

SEQ ID NO: 637 - DNA, 20 bp, Brassica napus
  source 1..20: mol_type = genomic DNA
tgacgtcagcaatgacgtgt

SEQ ID NO: 638 - DNA, 20 bp, Brassica napus
  source 1..20: mol_type = genomic DNA
tgacgtcagccatgacgcaa

SEQ ID NO: 639 - DNA, 20 bp, Brassica napus
  source 1..20: mol_type = genomic DNA
tgacgtcagccttgtcgtcc

SEQ ID NO: 640 - DNA, 20 bp, Brassica napus
  source 1..20: mol_type = genomic DNA
tgacgtcagctctgtcgtct

SEQ ID NO: 641 - DNA, 20 bp, Brassica napus
  source 1..20: mol_type = genomic DNA
tgacgtttgccatgaccact

SEQ ID NO: 642 - DNA, 20 bp, Brassica napus
  source 1..20: mol_type = genomic DNA
tgacttaggccatgacttct

SEQ ID NO: 643 - DNA, 20 bp, Brassica napus
  source 1..20: mol_type = genomic DNA
tgagataagccatgacttct

SEQ ID NO: 644 - DNA, 20 bp, Brassica napus
  source 1..20: mol_type = genomic DNA
tgccacaagccatggcgtct

SEQ ID NO: 645 - DNA, 20 bp, Brassica napus
  source 1..20: mol_type = genomic DNA
tgccggatgccgtgacgtct

SEQ ID NO: 646 - DNA, 20 bp, Brassica napus
  source 1..20: mol_type = genomic DNA
tgccgttagccatgaggtct

SEQ ID NO: 647 - DNA, 20 bp, Brassica napus
  source 1..20: mol_type = genomic DNA
tggcgttagccgtgacgact

SEQ ID NO: 648 - DNA, 20 bp, Brassica napus
  source 1..20: mol_type = genomic DNA
tgtcgtaggcagtgacgtct

SEQ ID NO: 649 - DNA, 20 bp, Brassica napus
  source 1..20: mol_type = genomic DNA
tgttgtaagccatgacatct

SEQ ID NO: 650 - DNA, 20 bp, Brassica napus
  source 1..20: mol_type = genomic DNA
tgttgtaagccttgacggct

SEQ ID NO: 651 - DNA, 20 bp, Brassica napus
  source 1..20: mol_type = genomic DNA
ttacgaaagccatgacgtca

SEQ ID NO: 652 - DNA, 20 bp, Brassica napus
  source 1..20: mol_type = genomic DNA
ttacgtaagccaagtcgtca

SEQ ID NO: 653 - DNA, 20 bp, Brassica napus
  source 1..20: mol_type = genomic DNA
ttacgtaatccatgacgtat

SEQ ID NO: 654 - DNA, 20 bp, Brassica napus
  source 1..20: mol_type = genomic DNA
agacgaaagcaatgacgtcg

SEQ ID NO: 655 - DNA, 20 bp, Brassica napus
  source 1..20: mol_type = genomic DNA
cgaagtaagccatggcgtca

SEQ ID NO: 656 - DNA, 20 bp, Brassica napus
  source 1..20: mol_type = genomic DNA
cgaagtaagccatggcgtct

SEQ ID NO: 657 - DNA, 20 bp, Brassica napus
  source 1..20: mol_type = genomic DNA
cgacgaaagccatgccgtgt

SEQ ID NO: 658 - DNA, 20 bp, Brassica napus
  source 1..20: mol_type = genomic DNA
cgacgttacccgtgacgtct

SEQ ID NO: 659 - DNA, 20 bp, Brassica napus
  source 1..20: mol_type = genomic DNA
cggcgaaatccatgacgtct

SEQ ID NO: 660 - DNA, 20 bp, Brassica napus
  source 1..20: mol_type = genomic DNA
cgtcgtaagccatggcggct

SEQ ID NO: 661 - DNA, 20 bp, Brassica napus
  source 1..20: mol_type = genomic DNA
ggacgtaagccaggacgccc

SEQ ID NO: 662 - DNA, 20 bp, Brassica napus
  source 1..20: mol_type = genomic DNA
taacgaaagccatgacatct

SEQ ID NO: 663 - DNA, 20 bp, Brassica napus
  source 1..20: mol_type = genomic DNA
tatcgtaagccatggcggct

SEQ ID NO: 664 - DNA, 20 bp, Brassica napus
  source 1..20: mol_type = genomic DNA
tcacgccagccatgacgact

SEQ ID NO: 665 - DNA, 20 bp, Brassica napus
  source 1..20: mol_type = genomic DNA
tcacgtatgctatgacgtct

SEQ ID NO: 666 - DNA, 20 bp, Brassica napus
  source 1..20: mol_type = genomic DNA
tcccggaagccatgacgtcg

SEQ ID NO: 667 - DNA, 20 bp, Brassica napus
  source 1..20: mol_type = genomic DNA
tcccgtaagccaagtcgtct

SEQ ID NO: 668 - DNA, 20 bp, Brassica napus
  source 1..20: mol_type = genomic DNA
tgaagttggccatgccgtct

SEQ ID NO: 669 - DNA, 20 bp, Brassica napus
  source 1..20: mol_type = genomic DNA
tgacaaaagccatgacgtct

SEQ ID NO: 670 - DNA, 20 bp, Brassica napus
  source 1..20: mol_type = genomic DNA
tgacaaaagcgatgacgtct

SEQ ID NO: 671 - DNA, 20 bp, Brassica napus
  source 1..20: mol_type = genomic DNA
tgacctaagctatgatgtct

SEQ ID NO: 672 - DNA, 20 bp, Brassica napus
  source 1..20: mol_type = genomic DNA
tgacgaaaaccaagacgtct

SEQ ID NO: 673 - DNA, 20 bp, Brassica napus
  source 1..20: mol_type = genomic DNA
tgacgaaaggcatgacgaca

SEQ ID NO: 674 - DNA, 20 bp, Brassica napus
  source 1..20: mol_type = genomic DNA
tgacgaaaggcatgacgacg

SEQ ID NO: 675 - DNA, 20 bp, Brassica napus
  source 1..20: mol_type = genomic DNA
tgacgaaagtcgggacgtct

SEQ ID NO: 676 - DNA, 20 bp, Brassica napus
  source 1..20: mol_type = genomic DNA
tgacgaagaccaagacgtct

SEQ ID NO: 677 - DNA, 20 bp, Brassica napus
  source 1..20: mol_type = genomic DNA
tgacgaaggacaagacgtct

SEQ ID NO: 678 - DNA, 20 bp, Brassica napus
  source 1..20: mol_type = genomic DNA
tgacgaatgccatgacgtga

SEQ ID NO: 679 - DNA, 20 bp, Brassica napus
  source 1..20: mol_type = genomic DNA
tgacgcaagcaatggcggct

SEQ ID NO: 680 - DNA, 20 bp, Brassica napus
  source 1..20: mol_type = genomic DNA
tgacgcaagcgatgacgcca

SEQ ID NO: 681 - DNA, 20 bp, Brassica napus
  source 1..20: mol_type = genomic DNA
tgacggaagacaagacgcct

SEQ ID NO: 682 - DNA, 20 bp, Brassica napus
  source 1..20: mol_type = genomic DNA
tgacggaatccatgacggct

SEQ ID NO: 683 - DNA, 20 bp, Brassica napus
  source 1..20: mol_type = genomic DNA
tgacggaatccatggcggct

SEQ ID NO: 684 - DNA, 20 bp, Brassica napus
  source 1..20: mol_type = genomic DNA
tgacggacgccatgacgccg

SEQ ID NO: 685 - DNA, 20 bp, Brassica napus
  source 1..20: mol_type = genomic DNA
tgacggacgccgtgacgtcg

SEQ ID NO: 686 - DNA, 20 bp, Brassica napus
  source 1..20: mol_type = genomic DNA
tgacgtaaaatatgacgtct

SEQ ID NO: 687 - DNA, 20 bp, Brassica napus
  source 1..20: mol_type = genomic DNA
tgacgtaagcaacgacgcca

SEQ ID NO: 688 - DNA, 20 bp, Brassica napus
  source 1..20: mol_type = genomic DNA
tgacgtaagcaatgacatca

SEQ ID NO: 689 - DNA, 20 bp, Brassica napus
  source 1..20: mol_type = genomic DNA
tgacgtaagcaatgacgtaa

SEQ ID NO: 690 - DNA, 20 bp, Brassica napus
  source 1..20: mol_type = genomic DNA
tgacgtaagcaatgatgttt

SEQ ID NO: 691 - DNA, 20 bp, Brassica napus
  source 1..20: mol_type = genomic DNA
tgacgtaagccatgaactca

SEQ ID NO: 692 - DNA, 20 bp, Brassica napus
  source 1..20: mol_type = genomic DNA
tgacgtactccatgacgtat

SEQ ID NO: 693 - DNA, 20 bp, Oryza sativa
  source 1..20: mol_type = genomic DNA
tgacgaatgccatgacgtca

SEQ ID NO: 694 - DNA, 20 bp, Oryza sativa
  source 1..20: mol_type = genomic DNA
tgacgtcagcaatgacgtca

SEQ ID NO: 695 - DNA, 20 bp, Oryza sativa
  source 1..20: mol_type = genomic DNA
tgacgtcagcgatgacgtca

SEQ ID NO: 696 - DNA, 20 bp, Zea mays
  source 1..20: mol_type = genomic DNA
agacgtaggccgtgacgtcg

SEQ ID NO: 697 - DNA, 20 bp, Zea mays
  source 1..20: mol_type = genomic DNA
cgacgtaagcctcgacgtcc

SEQ ID NO: 698 - DNA, 20 bp, Zea mays
  source 1..20: mol_type = genomic DNA
ggacgtaagccatatcgtcg

SEQ ID NO: 699 - DNA, 20 bp, Zea mays
  source 1..20: mol_type = genomic DNA
taacgtaagacatgacgtgt

SEQ ID NO: 700 - DNA, 20 bp, Zea mays
  source 1..20: mol_type = genomic DNA
tgacgtaagccacgcagtct

SEQ ID NO: 701 - DNA, 20 bp, Zea mays
  source 1..20: mol_type = genomic DNA
tgacgtaagccacgcggtct

SEQ ID NO: 702 - DNA, 20 bp, Zea mays
  source 1..20: mol_type = genomic DNA
tgacgtcacccatgacgaca

SEQ ID NO: 703 - DNA, 20 bp, Zea mays
  source 1..20: mol_type = genomic DNA
tgacgtcagcactgacgtca

SEQ ID NO: 704 - DNA, 20 bp, Zea mays
  source 1..20: mol_type = genomic DNA
tgacgtcagccatggaggct

SEQ ID NO: 705 - DNA, 20 bp, Zea mays
  source 1..20: mol_type = genomic DNA
tgacgtcagcgatgacatct

SEQ ID NO: 706 - DNA, 20 bp, Zea mays
  source 1..20: mol_type = genomic DNA
tgaagtcagccatgacgtct

SEQ ID NO: 707 - DNA, 20 bp, Zea mays
  source 1..20: mol_type = genomic DNA
tgacgtctgccatggcgtcc

SEQ ID NO: 708 - DNA, 20 bp, Zea mays
  source 1..20: mol_type = genomic DNA
tgacgtgagccatgtggtca

SEQ ID NO: 709 - DNA, 20 bp, Zea mays
  source 1..20: mol_type = genomic DNA
tgacgtgagtcatgaagtct

SEQ ID NO: 710 - DNA, 20 bp, Zea mays
  source 1..20: mol_type = genomic DNA
tgacgttggccatgtcgtcc

SEQ ID NO: 711 - DNA, 20 bp, Zea mays
  source 1..20: mol_type = genomic DNA
tgacgtcagcgctgacgtca

SEQ ID NO: 712 - DNA, 20 bp, Zea mays
  source 1..20: mol_type = genomic DNA
cgacgaaagccgtgacatct

SEQ ID NO: 713 - DNA, 20 bp, Zea mays
  source 1..20: mol_type = genomic DNA
cgacggaaaccatgacgtcg

SEQ ID NO: 714 - DNA, 20 bp, Zea mays
  source 1..20: mol_type = genomic DNA
cgacggaagccatgccatct

SEQ ID NO: 715 - DNA, 20 bp, Zea mays
  source 1..20: mol_type = genomic DNA
cgacggtagccatgccgtct

SEQ ID NO: 716 - DNA, 20 bp, Zea mays
  source 1..20: mol_type = genomic DNA
ggacggaagacatgacgtcc

SEQ ID NO: 717 - DNA, 20 bp, Zea mays
  source 1..20: mol_type = genomic DNA
ggaggtaggccatggcgtct

SEQ ID NO: 718 - DNA, 20 bp, Zea mays
  source 1..20: mol_type = genomic DNA
tagcgttagccatgacgact

SEQ ID NO: 719 - DNA, 20 bp, Zea mays
  source 1..20: mol_type = genomic DNA
tgaaggaaaccatgacgtct

SEQ ID NO: 720 - DNA, 20 bp, Zea mays
  source 1..20: mol_type = genomic DNA
tgaaggacgccatgacgact

SEQ ID NO: 721 - DNA, 20 bp, Zea mays
  source 1..20: mol_type = genomic DNA
tgaagtcagccatgacatct

SEQ ID NO: 722 - DNA, 20 bp, Zea mays
  source 1..20: mol_type = genomic DNA
tgaagtcagccatgacgtcg

SEQ ID NO: 723 - DNA, 20 bp, Zea mays
  source 1..20: mol_type = genomic DNA
tgacataagccatgccgtcg

SEQ ID NO: 724 - DNA, 20 bp, Zea mays
  source 1..20: mol_type = genomic DNA
tgacataagccgtgccgtca

SEQ ID NO: 725 - DNA, 20 bp, Zea mays
  source 1..20: mol_type = genomic DNA
tgacataagctatgacctct

SEQ ID NO: 726 - DNA, 20 bp, Zea mays
  source 1..20: mol_type = genomic DNA
tgacataggccatggcgtcg

SEQ ID NO: 727 - DNA, 20 bp, Zea mays
  source 1..20: mol_type = genomic DNA
tgaccagcgccatgacgtct

SEQ ID NO: 728 - DNA, 20 bp, Zea mays
  source 1..20: mol_type = genomic DNA
tgacgaaacccgtggcgtct

SEQ ID NO: 729 - DNA, 20 bp, Zea mays
  source 1..20: mol_type = genomic DNA
tgacgaaagccgtggcgtct

SEQ ID NO: 730 - DNA, 20 bp, Zea mays
  source 1..20: mol_type = genomic DNA
tgacgaaatccaagacgact

SEQ ID NO: 731 - DNA, 20 bp, Zea mays
  source 1..20: mol_type = genomic DNA
tgacgcacgcaaggacgtct

SEQ ID NO: 732 - DNA, 20 bp, Zea mays
  source 1..20: mol_type = genomic DNA
tgacgcgagccaagacctct

SEQ ID NO: 733 - DNA, 20 bp, Zea mays
  source 1..20: mol_type = genomic DNA
tgacgcgagccgtgacgtcc

SEQ ID NO: 734 - DNA, 20 bp, Zea mays
  source 1..20: mol_type = genomic DNA
tgacgctagccacgacgtcc

SEQ ID NO: 735 - DNA, 20 bp, Zea mays
  source 1..20: mol_type = genomic DNA
tgacgggaaccatgacgtct

SEQ ID NO: 736 - DNA, 20 bp, Zea mays
  source 1..20: mol_type = genomic DNA
tgacggtagcagtgacgtct

SEQ ID NO: 737 - DNA, 20 bp, Zea mays
  source 1..20: mol_type = genomic DNA
tgacggtagccacgacgtcc

SEQ ID NO: 738 - DNA, 20 bp, Zea mays
  source 1..20: mol_type = genomic DNA
tgacggtagccatgccgtca

SEQ ID NO: 739 - DNA, 20 bp, Zea mays
  source 1..20: mol_type = genomic DNA
tgaggtgtgccatggcgtct

SEQ ID NO: 740 - DNA, 20 bp, Zea mays
  source 1..20: mol_type = genomic DNA
tgatggaagcaatgacgtct

SEQ ID NO: 741 - DNA, 20 bp, Zea mays
  source 1..20: mol_type = genomic DNA
tgatgtaagccatgacatca

SEQ ID NO: 742 - DNA, 20 bp, Zea mays
  source 1..20: mol_type = genomic DNA
tgatgtatgccatgacatct

SEQ ID NO: 743 - DNA, 20 bp, Zea mays
  source 1..20: mol_type = genomic DNA
tgatgtatgccatgtcgtct

SEQ ID NO: 744 - DNA, 20 bp, Zea mays
  source 1..20: mol_type = genomic DNA
tgccgtaagccaacacgtcg

SEQ ID NO: 745 - DNA, 20 bp, Zea mays
  source 1..20: mol_type = genomic DNA
tggcggaagccatgacggcg

SEQ ID NO: 746 - DNA, 20 bp, Zea mays
  source 1..20: mol_type = genomic DNA
tggcgtaatcaatgacgtct

SEQ ID NO: 747 - DNA, 20 bp, Zea mays
  source 1..20: mol_type = genomic DNA
tggcgtcagcaatgacgtca

SEQ ID NO: 748 - DNA, 20 bp, Zea mays
  source 1..20: mol_type = genomic DNA
tgtcataggccatgacgtca

SEQ ID NO: 749 - DNA, 20 bp, Zea mays
  source 1..20: mol_type = genomic DNA
tgtcgagagccatgacgtca

SEQ ID NO: 750 - DNA, 20 bp, Zea mays
  source 1..20: mol_type = genomic DNA
tgtcgtaagccatgacaaca

SEQ ID NO: 751 - DNA, 20 bp, Sorghum bicolor
  source 1..20: mol_type = genomic DNA
acacgttagccatgacatct

SEQ ID NO: 752 - DNA, 20 bp, Sorghum bicolor
  source 1..20: mol_type = genomic DNA
agacgtaagccacgacgtag

SEQ ID NO: 753 - DNA, 20 bp, Sorghum bicolor
  source 1..20: mol_type = genomic DNA
cgacgtaggccatgaggtcc

SEQ ID NO: 754 - DNA, 20 bp, Sorghum bicolor
  source 1..20: mol_type = genomic DNA
ggacggaggccatgacgtca

SEQ ID NO: 755 - DNA, 20 bp, Sorghum bicolor
  source 1..20: mol_type = genomic DNA
ggacggaggccctgacgtct

SEQ ID NO: 756 - DNA, 20 bp, Sorghum bicolor
  source 1..20: mol_type = genomic DNA
ggacgtcggccatgacgtcc

SEQ ID NO: 757 - DNA, 20 bp, Sorghum bicolor
  source 1..20: mol_type = genomic DNA
ggacgttaaccatggcgtct

SEQ ID NO: 758 - DNA, 20 bp, Sorghum bicolor
  source 1..20: mol_type = genomic DNA
ggatgcaagccatgtcgtct

SEQ ID NO: 759 - DNA, 20 bp, Sorghum bicolor
  source 1..20: mol_type = genomic DNA
taacaaaagccatgacgtcg

SEQ ID NO: 760 - DNA, 20 bp, Sorghum bicolor
  source 1..20: mol_type = genomic DNA
tcacgcaagccatgacgccg

SEQ ID NO: 761 - DNA, 20 bp, Sorghum bicolor
  source 1..20: mol_type = genomic DNA
tgaagaaagccaggacgtcc

SEQ ID NO: 762 - DNA, 20 bp, Sorghum bicolor
  source 1..20: mol_type = genomic DNA
tgaagaaagccatgacgtcc

SEQ ID NO: 763 - DNA, 20 bp, Sorghum bicolor
  source 1..20: mol_type = genomic DNA
tgaagaaggccatgacgtcc

SEQ ID NO: 764 - DNA, 20 bp, Sorghum bicolor
  source 1..20: mol_type = genomic DNA
tgacatacgccatgccgtat

SEQ ID NO: 765 - DNA, 20 bp, Sorghum bicolor
  source 1..20: mol_type = genomic DNA
tgacatcagcaatgacgtca

SEQ ID NO: 766 - DNA, 20 bp, Sorghum bicolor
  source 1..20: mol_type = genomic DNA
tgacatcagcgatgacgtca

SEQ ID NO: 767 - DNA, 20 bp, Sorghum bicolor
  source 1..20: mol_type = genomic DNA
tgacatgagcgatggcgtct

SEQ ID NO: 768 - DNA, 20 bp, Sorghum bicolor
  source 1..20: mol_type = genomic DNA
tgacgaaacccaacacgtct

SEQ ID NO: 769 - DNA, 20 bp, Sorghum bicolor
  source 1..20: mol_type = genomic DNA
tgacgaaagcgaggacggct

SEQ ID NO: 770 - DNA, 20 bp, Sorghum bicolor
  source 1..20: mol_type = genomic DNA
tgacgaaaggcatgaggtcc

SEQ ID NO: 771 - DNA, 20 bp, Sorghum bicolor
  source 1..20: mol_type = genomic DNA
tgacgaaggcaatgacgact

SEQ ID NO: 772 - DNA, 20 bp, Sorghum bicolor
  source 1..20: mol_type = genomic DNA
tgacgaaggccatggtgtct

SEQ ID NO: 773 - DNA, 20 bp, Sorghum bicolor
  source 1..20: mol_type = genomic DNA
tgacgacacccatgacggct

SEQ ID NO: 774 - DNA, 20 bp, Sorghum bicolor
  source 1..20: mol_type = genomic DNA
tgacgacagccatggcgtcg

SEQ ID NO: 775 - DNA, 20 bp, Sorghum bicolor
  source 1..20: mol_type = genomic DNA
tgacgagagccgtgacgtcc

SEQ ID NO: 776 - DNA, 20 bp, Sorghum bicolor
  source 1..20: mol_type = genomic DNA
tgacgcaacccatgtcgtcg

SEQ ID NO: 777 - DNA, 20 bp, Sorghum bicolor
  source 1..20: mol_type = genomic DNA
tgacgcaagccgttgcgtct

SEQ ID NO: 778 - DNA, 20 bp, Sorghum bicolor
  source 1..20: mol_type = genomic DNA
tgacgcacgccatgacatca

SEQ ID NO: 779 - DNA, 20 bp, Sorghum bicolor
  source 1..20: mol_type = genomic DNA
tgacgcgcgccatgacgtcc

SEQ ID NO: 780 - DNA, 20 bp, Sorghum bicolor
  source 1..20: mol_type = genomic DNA
tgacggaagccatggcatgt

SEQ ID NO: 781 - DNA, 20 bp, Sorghum bicolor
  source 1..20: mol_type = genomic DNA
tgacggcagccagcacgtct

SEQ ID NO: 782 - DNA, 20 bp, Sorghum bicolor
  source 1..20: mol_type = genomic DNA
tgacggcagccttggcgtct

SEQ ID NO: 783 - DNA, 20 bp, Sorghum bicolor
  source 1..20: mol_type = genomic DNA
tgacggccgccaggacgtct

SEQ ID NO: 784 - DNA, 20 bp, Sorghum bicolor
  source 1..20: mol_type = genomic DNA
tgacggtagcaacgacgtct

SEQ ID NO: 785 - DNA, 20 bp, Sorghum bicolor
  source 1..20: mol_type = genomic DNA
tgacggtagctacgacgtct

SEQ ID NO: 786 - DNA, 20 bp, Sorghum bicolor
  source 1..20: mol_type = genomic DNA
tgacgtaagaactgacgtcc

SEQ ID NO: 787 - DNA, 20 bp, Sorghum bicolor
  source 1..20: mol_type = genomic DNA
tgacgtaagccatgatgtgt

SEQ ID NO: 788 - DNA, 20 bp, Sorghum bicolor
  source 1..20: mol_type = genomic DNA
tgacgtaaggcatggcttct

SEQ ID NO: 789 - DNA, 20 bp, Sorghum bicolor
  source 1..20: mol_type = genomic DNA
tgacgtactccacgacgtcg

SEQ ID NO: 790 - DNA, 20 bp, Sorghum bicolor
  source 1..20: mol_type = genomic DNA
tgacgtagaccatgacatcg

SEQ ID NO: 791 - DNA, 20 bp, Sorghum bicolor
  source 1..20: mol_type = genomic DNA
tgacgtatgcaacgacgtat

SEQ ID NO: 792 - DNA, 20 bp, Sorghum bicolor
  source 1..20: mol_type = genomic DNA
tgacgtatgccatcaggact

SEQ ID NO: 793 - DNA, 20 bp, Sorghum bicolor
  source 1..20: mol_type = genomic DNA
tgacgtcagcaatgaggtca

SEQ ID NO: 794 - DNA, 20 bp, Sorghum bicolor
  source 1..20: mol_type = genomic DNA
tgacgtcagcaatgatgtca

SEQ ID NO: 795 - DNA, 20 bp, Sorghum bicolor
  source 1..20: mol_type = genomic DNA
tgaagtcagccatgacgtct

SEQ ID NO: 796 - DNA, 20 bp, Sorghum bicolor
  source 1..20: mol_type = genomic DNA
tgacgtcagccttgtcgtcc

SEQ ID NO: 797 - DNA, 20 bp, Sorghum bicolor
  source 1..20: mol_type = genomic DNA
tgacgtcagcgatgacgtgg

SEQ ID NO: 798 - DNA, 20 bp, Sorghum bicolor
  source 1..20: mol_type = genomic DNA
tgacgtcagcgatgatgtca

SEQ ID NO: 799 - DNA, 20 bp, Sorghum bicolor
  source 1..20: mol_type = genomic DNA
tgacgtcatccatgacgttt

SEQ ID NO: 800 - DNA, 20 bp, Sorghum bicolor
  source 1..20: mol_type = genomic DNA
tgacgtcgaccatggcgtct

SEQ ID NO: 801 - DNA, 20 bp, Sorghum bicolor
  source 1..20: mol_type = genomic DNA
tgacgtgaccaaggacgtct

SEQ ID NO: 802 - DNA, 20 bp, Sorghum bicolor
  source 1..20: mol_type = genomic DNA
tgacgtgagcaatgatgtca

SEQ ID NO: 803 - DNA, 20 bp, Sorghum bicolor
  source 1..20: mol_type = genomic DNA
tgacgtgagccatgtcctca

SEQ ID NO: 804 - DNA, 20 bp, Sorghum bicolor
  source 1..20: mol_type = genomic DNA
tgacgtgagtcatgaagtct

SEQ ID NO: 805 - DNA, 20 bp, Sorghum bicolor
  source 1..20: mol_type = genomic DNA
tgacgtgcgccatgacatca

SEQ ID NO: 806 - DNA, 20 bp, Sorghum bicolor
  source 1..20: mol_type = genomic DNA
tgacgttggccaagccgtct

SEQ ID NO: 807 - DNA, 20 bp, Sorghum bicolor
  source 1..20: mol_type = genomic DNA
tgactgaagccacgacgtat

SEQ ID NO: 808 - DNA, 20 bp, Sorghum bicolor
  source 1..20: mol_type = genomic DNA
tgaggtaagccatgtcgtgt

SEQ ID NO: 809 - DNA, 20 bp, Sorghum bicolor
  source 1..20: mol_type = genomic DNA
tgccgtaaaccatgaagtcg

SEQ ID NO: 810 - DNA, 20 bp, Sorghum bicolor
  source 1..20: mol_type = genomic DNA
tgccgtcgggcatgacgtct

SEQ ID NO: 811 - DNA, 20 bp, Sorghum bicolor
  source 1..20: mol_type = genomic DNA
tggcaaaagtcatgacgtct

SEQ ID NO: 812 - DNA, 20 bp, Sorghum bicolor
  source 1..20: mol_type = genomic DNA
tggcaggagccatgacgtct

SEQ ID NO: 813 - DNA, 20 bp, Sorghum bicolor
  source 1..20: mol_type = genomic DNA
tggcataggccatggcgtct

SEQ ID NO: 814 - DNA, 20 bp, Sorghum bicolor
  source 1..20: mol_type = genomic DNA
tggcgtaagaaaggacgtct

SEQ ID NO: 815 - DNA, 20 bp, Sorghum bicolor
  source 1..20: mol_type = genomic DNA
tggcgtaaggcgtgacgtcc

SEQ ID NO: 816 - DNA, 20 bp, Sorghum bicolor
  source 1..20: mol_type = genomic DNA
tggcgtataccatgacatct

SEQ ID NO: 817 - DNA, 20 bp, Sorghum bicolor
  source 1..20: mol_type = genomic DNA
tggcgtatgccatgccgtat

SEQ ID NO: 818 - DNA, 20 bp, Sorghum bicolor
  source 1..20: mol_type = genomic DNA
tggcgtccgccatgacgttt

SEQ ID NO: 819 - DNA, 20 bp, Sorghum bicolor
  source 1..20: mol_type = genomic DNA
tggcttaagccaggaggtct

SEQ ID NO: 820 - DNA, 20 bp, Sorghum bicolor
  source 1..20: mol_type = genomic DNA
tgtcgtatgcaatgacgact

SEQ ID NO: 821 - DNA, 20 bp, Sorghum bicolor
  source 1..20: mol_type = genomic DNA
tgtcgtcggccatgtcgtct

SEQ ID NO: 822 - DNA, 20 bp, Sorghum bicolor
  source 1..20: mol_type = genomic DNA
tgttgtcagccatgacgcct

SEQ ID NO: 823 - DNA, 20 bp, Glycine max
  source 1..20: mol_type = genomic DNA
tgacgtaagcaaggacgtca

SEQ ID NO: 824 - DNA, 20 bp, Glycine max
  source 1..20: mol_type = genomic DNA
aaacgtaatccatgacgtct

SEQ ID NO: 825 - DNA, 20 bp, Glycine max
  source 1..20: mol_type = genomic DNA
tgacgtaagccactacgtgc

SEQ ID NO: 826 - DNA, 20 bp, Glycine max
  source 1..20: mol_type = genomic DNA
tgacgtattccatgacgtat

SEQ ID NO: 827 - DNA, 20 bp, Glycine max
  source 1..20: mol_type = genomic DNA
ttacgtaagtcgtgacgtct

SEQ ID NO: 828 - DNA, 20 bp, Glycine max
  source 1..20: mol_type = genomic DNA
tgacgtaagcagagacgtat

SEQ ID NO: 829 - DNA, 20 bp, Glycine max
  source 1..20: mol_type = genomic DNA
ttacgtttgccattacgtct

SEQ ID NO: 830 - DNA, 20 bp, Glycine max
  source 1..20: mol_type = genomic DNA
tgacgtatgctattacgcct

SEQ ID NO: 831 - DNA, 20 bp, Glycine max
  source 1..20: mol_type = genomic DNA
aatcgtaagccatgacgtca

SEQ ID NO: 832 - DNA, 20 bp, Glycine max
  source 1..20: mol_type = genomic DNA
acacctcagccatgacgtct

SEQ ID NO: 833 - DNA, 20 bp, Glycine max
  source 1..20: mol_type = genomic DNA
agatgtacgtcatgacgtct

SEQ ID NO: 834 - DNA, 20 bp, Glycine max
  source 1..20: mol_type = genomic DNA
cgacgtaaggcatgacctcc

SEQ ID NO: 835 - DNA, 20 bp, Glycine max
  source 1..20: mol_type = genomic DNA
ggccgtaagctatgacgtat

SEQ ID NO: 836 - DNA, 20 bp, Glycine max
  source 1..20: mol_type = genomic DNA
ggtcgtaagccatgaagtct

SEQ ID NO: 837 - DNA, 20 bp, Glycine max
  source 1..20: mol_type = genomic DNA
taaaataagccatgacgtca

SEQ ID NO: 838 - DNA, 20 bp, Glycine max
  source 1..20: mol_type = genomic DNA
taacgtaagacatggcgtgt

SEQ ID NO: 839 - DNA, 20 bp, Glycine max
  source 1..20: mol_type = genomic DNA
tcacgaaagccatggcgttt

SEQ ID NO: 840 - DNA, 20 bp, Glycine max
  source 1..20: mol_type = genomic DNA
tcccgtaagccttgaggtct

SEQ ID NO: 841 - DNA, 20 bp, Glycine max
  source 1..20: mol_type = genomic DNA
tgaagcaagctatgacggct

SEQ ID NO: 842 - DNA, 20 bp, Glycine max
  source 1..20: mol_type = genomic DNA
tgaagtagtccatgacgact

SEQ ID NO: 843 - DNA, 20 bp, Glycine max
  source 1..20: mol_type = genomic DNA
tgacaaaagacatgtcgtct

SEQ ID NO: 844 - DNA, 20 bp, Glycine max
  source 1..20: mol_type = genomic DNA
tgacaaaagccacgacctct

SEQ ID NO: 845 - DNA, 20 bp, Glycine max
  source 1..20: mol_type = genomic DNA
tgacacaagccgtgaagtct

SEQ ID NO: 846 - DNA, 20 bp, Glycine max
  source 1..20: mol_type = genomic DNA
tgacagaagccacgacctct

SEQ ID NO: 847 - DNA, 20 bp, Glycine max
  source 1..20: mol_type = genomic DNA
tgacagaagccatggcctct

SEQ ID NO: 848 - DNA, 20 bp, Glycine max
  source 1..20: mol_type = genomic DNA
tgacataagcaatgacgtag

SEQ ID NO: 849 - DNA, 20 bp, Glycine max
  source 1..20: mol_type = genomic DNA
tgacatcagctatgacgact

SEQ ID NO: 850 - DNA, 20 bp, Glycine max
  source 1..20: mol_type = genomic DNA
tgaccacaaccatgacgtct

SEQ ID NO: 851 - DNA, 20 bp, Glycine max
  source 1..20: mol_type = genomic DNA
tgacctaacccatgaggtct

SEQ ID NO: 852 - DNA, 20 bp, Glycine max
  source 1..20: mol_type = genomic DNA
tgacctaagacatgaggtct

SEQ ID NO: 853 - DNA, 20 bp, Glycine max
  source 1..20: mol_type = genomic DNA
tgacctaagccatgaagacc

SEQ ID NO: 854 - DNA, 20 bp, Glycine max
  source 1..20: mol_type = genomic DNA
tgaccttagccataacgtct

SEQ ID NO: 855 - DNA, 20 bp, Glycine max
  source 1..20: mol_type = genomic DNA
tgaccttatccatgacgtcc

SEQ ID NO: 856 - DNA, 20 bp, Glycine max
  source 1..20: mol_type = genomic DNA
tgacgaaaacaatgacgact

SEQ ID NO: 857 - DNA, 20 bp, Glycine max
  source 1..20: mol_type = genomic DNA
tgacgaaaaccatttcgtct

SEQ ID NO: 858 - DNA, 20 bp, Glycine max
  source 1..20: mol_type = genomic DNA
tgacgaaagccatgatgagt

SEQ ID NO: 859 - DNA, 20 bp, Glycine max
  source 1..20: mol_type = genomic DNA
tgacgaaagccatggcgatt

SEQ ID NO: 860 - DNA, 20 bp, Glycine max
  source 1..20: mol_type = genomic DNA
tgacgaaagccatgggctct

SEQ ID NO: 861 - DNA, 20 bp, Glycine max
  source 1..20: mol_type = genomic DNA
tgacgaaagtcatgacggca

SEQ ID NO: 862 - DNA, 20 bp, Glycine max
  source 1..20: mol_type = genomic DNA
tgacgaaatcaatgacgact

SEQ ID NO: 863 - DNA, 20 bp, Glycine max
  source 1..20: mol_type = genomic DNA
tgacgcaagccatgtcatat

SEQ ID NO: 864 - DNA, 20 bp, Glycine max
  source 1..20: mol_type = genomic DNA
tgacgcattccatgacttct

SEQ ID NO: 865 - DNA, 20 bp, Glycine max
  source 1..20: mol_type = genomic DNA
tgacggaagccatgatgagt

SEQ ID NO: 866 - DNA, 20 bp, Glycine max
  source 1..20: mol_type = genomic DNA
tgacggaaggcaagacgtgt

SEQ ID NO: 867 - DNA, 20 bp, Glycine max
  source 1..20: mol_type = genomic DNA
tgacgtaagccaccacgaca

SEQ ID NO: 868 - DNA, 20 bp, Glycine max
  source 1..20: mol_type = genomic DNA
tgacgtaagccagttggtct

SEQ ID NO: 869 - DNA, 20 bp, Glycine max
  source 1..20: mol_type = genomic DNA
tgacgtaagccatgacacaa

SEQ ID NO: 870 - DNA, 20 bp, Glycine max
  source 1..20: mol_type = genomic DNA
tgacgtaagcgatgaggagt

SEQ ID NO: 871 - DNA, 20 bp, Glycine max
  source 1..20: mol_type = genomic DNA
tgacgtaaggcatttcgtca

SEQ ID NO: 872 - DNA, 20 bp, Glycine max
  source 1..20: mol_type = genomic DNA
tgacgtaggccatgtcttcc

SEQ ID NO: 873 - DNA, 20 bp, Glycine max
  source 1..20: mol_type = genomic DNA
tgacgtattccatgacgaca

SEQ ID NO: 874 - DNA, 20 bp, Glycine max
  source 1..20: mol_type = genomic DNA
tgacgtcaaccatgacctca

SEQ ID NO: 875 - DNA, 20 bp, Glycine max
  source 1..20: mol_type = genomic DNA
tgacgtcagccttgtcgtcc

SEQ ID NO: 876 - DNA, 20 bp, Glycine max
  source 1..20: mol_type = genomic DNA
tgacgtccgctatgccgtct

SEQ ID NO: 877 - DNA, 20 bp, Glycine max
  source 1..20: mol_type = genomic DNA
tgacgtgagccatgccttat

SEQ ID NO: 878 - DNA, 20 bp, Glycine max
  source 1..20: mol_type = genomic DNA
tgacgtgagctatgacatcg

SEQ ID NO: 879 - DNA, 20 bp, Glycine max
  source 1..20: mol_type = genomic DNA
tgacgttagcgatgacttcg

SEQ ID NO: 880 - DNA, 20 bp, Glycine max
  source 1..20: mol_type = genomic DNA
tgactaaagccacgacctct

SEQ ID NO: 881 - DNA, 20 bp, Glycine max
  source 1..20: mol_type = genomic DNA
tgactaaagccatggcctct

SEQ ID NO: 882 - DNA, 20 bp, Glycine max
  source 1..20: mol_type = genomic DNA
tgacttaaaccatcacgtct

SEQ ID NO: 883 - DNA, 20 bp, Glycine max
  source 1..20: mol_type = genomic DNA
tgagggaagccatgtcatct

SEQ ID NO: 884 - DNA, 20 bp, Glycine max
  source 1..20: mol_type = genomic DNA
tgaggtaagacatggcgtgt

SEQ ID NO: 885 - DNA, 20 bp, Glycine max
  source 1..20: mol_type = genomic DNA
tgaggtaagcaatgacttct

SEQ ID NO: 886 - DNA, 20 bp, Glycine max
  source 1..20: mol_type = genomic DNA
tgaggttagcagtgacgtct

SEQ ID NO: 887 - DNA, 20 bp, Glycine max
  source 1..20: mol_type = genomic DNA
tgatgaaagccatgaagtca

SEQ ID NO: 888 - DNA, 20 bp, Glycine max
  source 1..20: mol_type = genomic DNA
tgatggaagccatgacgagt

SEQ ID NO: 889 - DNA, 20 bp, Glycine max
  source 1..20: mol_type = genomic DNA
tgatggaagccatgatgact

SEQ ID NO: 890 - DNA, 20 bp, Glycine max
  source 1..20: mol_type = genomic DNA
tgatgtaaaccatgacgacc

SEQ ID NO: 891 - DNA, 20 bp, Glycine max
  source 1..20: mol_type = genomic DNA
tgatgtaagccgtgacggat

SEQ ID NO: 892 - DNA, 20 bp, Glycine max
  source 1..20: mol_type = genomic DNA
tgccgtaagcaacgacgtcg

SEQ ID NO: 893 - DNA, 20 bp, Glycine max
  source 1..20: mol_type = genomic DNA
tggcagaagccatgacctct

SEQ ID NO: 894 - DNA, 20 bp, Glycine max
  source 1..20: mol_type = genomic DNA
tggcgaaagccatggcctct

SEQ ID NO: 895 - DNA, 20 bp, Glycine max
  source 1..20: mol_type = genomic DNA
tggcgcaaggcatgacctct

SEQ ID NO: 896 - DNA, 20 bp, Glycine max
  source 1..20: mol_type = genomic DNA
tggcgtaagcaatgacgtca

SEQ ID NO: 897 - DNA, 20 bp, Glycine max
  source 1..20: mol_type = genomic DNA
tggcgtcagcgatgacggct

SEQ ID NO: 898 - DNA, 20 bp, Glycine max
  source 1..20: mol_type = genomic DNA
tggcgtcatccatggcgtct

SEQ ID NO: 899 - DNA, 20 bp, Glycine max
  source 1..20: mol_type = genomic DNA
tggcgttagcgatgacggct

SEQ ID NO: 900 - DNA, 20 bp, Glycine max
  source 1..20: mol_type = genomic DNA
tggctcaagccatgacttct

SEQ ID NO: 901 - DNA, 20 bp, Glycine max
  source 1..20: mol_type = genomic DNA
tgtcgatagccatgacgact

SEQ ID NO: 902 - DNA, 20 bp, Glycine max
  source 1..20: mol_type = genomic DNA
tgtcgtaagccaagatatct

SEQ ID NO: 903 - DNA, 20 bp, Glycine max
  source 1..20: mol_type = genomic DNA
ttgcttaagccatgacgtca

SEQ ID NO: 904 - DNA, 35 bp, Glycine max
  source 1..35: mol_type = genomic DNA
aagataagataaaagatttaaagataagattagaa

SEQ ID NO: 905 - DNA, 35 bp, Glycine max
  source 1..35: mol_type = genomic DNA
aagataagagattaaagtaaaagataagaaatgta

SEQ ID NO: 906 - DNA, 35 bp, Glycine max
  source 1..35: mol_type = genomic DNA
aagataagataaaaaagtaaaagataagaaaaata

SEQ ID NO: 907 - DNA, 35 bp, Glycine max
  source 1..35: mol_type = genomic DNA
aaaacaagataagaaagtaaaagataagaggaaga

SEQ ID NO: 908 - DNA, 35 bp, Glycine max; identical to SEQ ID NO: 521
  source 1..35: mol_type = genomic DNA

SEQ ID NO: 909 - DNA, 35 bp, Glycine max; identical to SEQ ID NO: 522
  source 1..35: mol_type = genomic DNA

SEQ ID NO: 910 - DNA, 35 bp, Glycine max
  source 1..35: mol_type = genomic DNA
aagataagataaaaaagtaaaagataagaaaaaaa

SEQ ID NO: 911 - DNA, 35 bp, Glycine max
  source 1..35: mol_type = genomic DNA
aaaaaaagatgaaaattttgaagaaaaaaggggta

SEQ ID NO: 912 - DNA, 35 bp, Glycine max
  source 1..35: mol_type = genomic DNA
aaaagaaaaaaataaggttgtagagaagagtagaa

SEQ ID NO: 913 - DNA, 35 bp, Glycine max
  source 1..35: mol_type = genomic DNA
aaaagaagaaaataaaattgaaaatcagactgggc

SEQ ID NO: 914 - DNA, 35 bp, Glycine max
  source 1..35: mol_type = genomic DNA
aaaataaaataataatgtggatgaccaggttgggt

SEQ ID NO: 915 - DNA, 35 bp, Glycine max
  source 1..35: mol_type = genomic DNA
aaaataagagaaaaaaattgatgaaaagagagaga

SEQ ID NO: 916 - DNA, 35 bp, Glycine max
  source 1..35: mol_type = genomic DNA
aaaataagataaatatgttaaggataaaaaaggaa

SEQ ID NO: 917 - DNA, 35 bp, Glycine max
  source 1..35: mol_type = genomic DNA
aaaataagttaaacatgtttaaaacatgagtgtga

SEQ ID NO: 918 - DNA, 35 bp, Glycine max
  source 1..35: mol_type = genomic DNA
aaaatactataattttgttggagctaagagtggaa

SEQ ID NO: 919 - DNA, 35 bp, Glycine max
  source 1..35: mol_type = genomic DNA
aaaataggataattattatgtagataatggttgga

SEQ ID NO: 920 - DNA, 35 bp, Glycine max
  source 1..35: mol_type = genomic DNA
aaaatgaaaaaataaggttgcagagaagagtagaa

SEQ ID NO: 921 - DNA, 35 bp, Glycine max
  source 1..35: mol_type = genomic DNA
aaaatgaaaaaataaggttgtagagaagagtagaa

SEQ ID NO: 922 - DNA, 35 bp, Glycine max
  source 1..35: mol_type = genomic DNA
aaaatgaaataaagatgttggaaataggagtgtga

SEQ ID NO: 923 - DNA, 35 bp, Glycine max
  source 1..35: mol_type = genomic DNA
aaaatgaaataaagatgttgtaaataggagtgtga

SEQ ID NO: 924 - DNA, 35 bp, Glycine max
  source 1..35: mol_type = genomic DNA
aaaattagataaatatattaaagataagaatggaa

SEQ ID NO: 925 - DNA, 35 bp, Glycine max
  source 1..35: mol_type = genomic DNA
aaagcaagttaataaggttaaagaaaagaacggga

SEQ ID NO: 926 - DNA, 35 bp, Glycine max
  source 1..35: mol_type = genomic DNA
aaagtaagaaaaaaatgatgatgagaacagttgga

SEQ ID NO: 927 - DNA, 35 bp, Glycine max
  source 1..35: mol_type = genomic DNA
aaagttaaaaaataaagatgaagaaaagagtagga

SEQ ID NO: 928 - DNA, 35 bp, Glycine max
  source 1..35: mol_type = genomic DNA
aaataaaaataataaggttgcagagaagagtagaa

SEQ ID NO: 929 - DNA, 35 bp, Glycine max
  source 1..35: mol_type = genomic DNA
aaatgaagaaaataaggttgcagagaagagtagaa

SEQ ID NO: 930 - DNA, 35 bp, Glycine max
  source 1..35: mol_type = genomic DNA
aaattaaaaaaataaggttgtagagaagagtagaa

SEQ ID NO: 931 - DNA, 35 bp, Glycine max
  source 1..35: mol_type = genomic DNA
aaatttaaaaaataaagatgaagaaaagagtagga

SEQ ID NO: 932 - DNA, 35 bp, Glycine max
  source 1..35: mol_type = genomic DNA
aagaaaaaataataagaatgcaaaaaagagtagga

SEQ ID NO: 933 - DNA, 35 bp, Glycine max
  source 1..35: mol_type = genomic DNA
aagaaaaaataataataatgcaaagaagagtagaa

SEQ ID NO: 934 - DNA, 35 bp, Glycine max
  source 1..35: mol_type = genomic DNA
aagaaaagataaaagatttaaagataagaatagaa

SEQ ID NO: 935 - DNA, 35 bp, Glycine max
  source 1..35: mol_type = genomic DNA
aagaaaagataaaagatttaaagataagactagaa

SEQ ID NO: 936 - DNA, 35 bp, Glycine max
  source 1..35: mol_type = genomic DNA
aagaaaagataagattcttaaagataaaattggaa

SEQ ID NO: 937 - DNA, 35 bp, Glycine max
  source 1..35: mol_type = genomic DNA
aagaaatgataagaaagataaagataagagtaaaa

SEQ ID NO: 938 - DNA, 35 bp, Glycine max
  source 1..35: mol_type = genomic DNA
aagaagagatattattgttgaaactcagaatgggc

SEQ ID NO: 939 - DNA, 35 bp, Glycine max
  source 1..35: mol_type = genomic DNA
aagacaacatagtgaatttgaatataagagatgga

SEQ ID NO: 940 - DNA, 35 bp, Glycine max
  source 1..35: mol_type = genomic DNA
aagagaagatagaaaagtatatgataagattggga

SEQ ID NO: 941 - DNA, 35 bp, Glycine max
  source 1..35: mol_type = genomic DNA
aagagaggagaataatgtacaagatcagaatgaca

SEQ ID NO: 942 - DNA, 35 bp, Glycine max
  source 1..35: mol_type = genomic DNA
aagataaaaaaatgaaaatgaagagaagagtagaa

SEQ ID NO: 943 - DNA, 35 bp, Glycine max
  source 1..35: mol_type = genomic DNA
aagataagaaaatgataaagatgaaaagagtggag

SEQ ID NO: 944 - DNA, 35 bp, Glycine max
  source 1..35: mol_type = genomic DNA
aagataagaaaattgtgttgatgatgatattggga

SEQ ID NO: 945 - DNA, 35 bp, Glycine max
  source 1..35: mol_type = genomic DNA
aagataagaagaaaatgatgtagaaatgagatgga

SEQ ID NO: 946 - DNA, 35 bp, Glycine max
  source 1..35: mol_type = genomic DNA
aagataagataaaaaagtaaaagataagaaacaaa

SEQ ID NO: 947 - DNA, 35 bp, Glycine max
  source 1..35: mol_type = genomic DNA
aagataagataaagatttaaaagaaaagatagaga

SEQ ID NO: 948 - DNA, 35 bp, Glycine max
  source 1..35: mol_type = genomic DNA
aagataagataagaatattaaatgtaagagtttaa

SEQ ID NO: 949 - DNA, 35 bp, Glycine max
  source 1..35: mol_type = genomic DNA
aagataagataagattggaggaaataaaatttgga

SEQ ID NO: 950 - DNA, 35 bp, Glycine max
  source 1..35: mol_type = genomic DNA
aagataagataagattggatgaaataaaattggga

SEQ ID NO: 951 - DNA, 35 bp, Glycine max
  source 1..35: mol_type = genomic DNA
aagtaaaaaaaataaagatgaagaaaagagtagga

SEQ ID NO: 952 - DNA, 35 bp, Glycine max
  source 1..35: mol_type = genomic DNA
aagttaaaaaaataaagatgaagaaaaaagtacga

SEQ ID NO: 953 - DNA, 35 bp, Glycine max
  source 1..35: mol_type = genomic DNA
aagttaaaaaaataaagatgaagaaaagagtagga

SEQ ID NO: 954 - DNA, 35 bp, Glycine max
  source 1..35: mol_type = genomic DNA
aagttgaaaaaatgaagatgaagaaaagagtagga

SEQ ID NO: 955 - DNA, 35 bp, Glycine max
  source 1..35: mol_type = genomic DNA
aatatgagatgatgatgttgatgttaagagtgata

SEQ ID NO: 956 - DNA, 35 bp, Glycine max
  source 1..35: mol_type = genomic DNA
aatggaagagaattatgtagaagataaaagagggt

SEQ ID NO: 957 - DNA, 35 bp, Glycine max
  source 1..35: mol_type = genomic DNA
agactaagataatgatgctaaagatgagacttgga

SEQ ID NO: 958 - DNA, 35 bp, Glycine max
  source 1..35: mol_type = genomic DNA
aggaaaagaaaataatgttgagggtaaaattgagt

SEQ ID NO: 959 - DNA, 35 bp, Glycine max
  source 1..35: mol_type = genomic DNA
aggatgagataagagagataaagataagaatgaga

SEQ ID NO: 960 - DNA, 35 bp, Glycine max
  source 1..35: mol_type = genomic DNA
aggtttaaaaaataaagatgaagaaaagagtagga

SEQ ID NO: 961 - DNA, 35 bp, Glycine max
  source 1..35: mol_type = genomic DNA
agtagaagacaatagtgcggtagatatgagtggga

SEQ ID NO: 962 - DNA, 35 bp, Glycine max
  source 1..35: mol_type = genomic DNA
atgaaatgatattaatgttgatgataatgttgaga

SEQ ID NO: 963 - DNA, 35 bp, Glycine max
  source 1..35: mol_type = genomic DNA
atgaaatgatattaatgttgatgatactattgaga

SEQ ID NO: 964 - DNA, 35 bp, Glycine max
  source 1..35: mol_type = genomic DNA
atgacaagttcataatgttgatatgaagattggga

SEQ ID NO: 965 - DNA, 35 bp, Glycine max
  source 1..35: mol_type = genomic DNA
atgagatgatattaatgttgatgataatattgaga

SEQ ID NO: 966 - DNA, 35 bp, Glycine max
  source 1..35: mol_type = genomic DNA
atgagatgatattaatgttgatgataatgctgaga

SEQ ID NO: 967 - DNA, 35 bp, Glycine max
  source 1..35: mol_type = genomic DNA
atgagatgatattgatgttgatgatgatattggga

SEQ ID NO: 968 - DNA, 35 bp, Glycine max
  source 1..35: mol_type = genomic DNA
atgataagataaaaatgtataaaataagggagtaa

SEQ ID NO: 969 - DNA, 35 bp, Glycine max
  source 1..35: mol_type = genomic DNA
atgataagatgatgatgatgaacataaacatggca

SEQ ID NO: 970 - DNA, 35 bp, Glycine max
  source 1..35: mol_type = genomic DNA
atgatatgatattaacgttgatgataatgttgaga

SEQ ID NO: 971 - DNA, 35 bp, Glycine max
  source 1..35: mol_type = genomic DNA
atgatatgatattaatgttgatgataatgttgaga

SEQ ID NO: 972 - DNA, 35 bp, Glycine max
  source 1..35: mol_type = genomic DNA
atgatatgatattgatgttgaaaatgacattgaga

SEQ ID NO: 973 - DNA, 35 bp, Glycine max
  source 1..35: mol_type = genomic DNA
atgatatgatgttgatgttgaagatgacattgaga

SEQ ID NO: 974 - DNA, 35 bp, Glycine max
  source 1..35: mol_type = genomic DNA
attttaaaaaaataaagatgaagaaaagagtagga

SEQ ID NO: 975 - DNA, 35 bp, Glycine max
  source 1..35: mol_type = genomic DNA
catacaagagaatggtattgaggataagagtggca

SEQ ID NO: 976 - DNA, 35 bp, Glycine max
  source 1..35: mol_type = genomic DNA
gagataagatattaaagtacaagataagacatgta

SEQ ID NO: 977 - DNA, 35 bp, Glycine max
  source 1..35: mol_type = genomic DNA
gagataagatgataatgttgagaatgatattgaga

SEQ ID NO: 978 - DNA, 35 bp, Glycine max
  source 1..35: mol_type = genomic DNA
ggaatatgataataaaactgaagacaagaatggga

SEQ ID NO: 979 - DNA, 35 bp, Glycine max
  source 1..35: mol_type = genomic DNA
gtgataaagaaatagtattaaagatgagagtggga

SEQ ID NO: 980 - DNA, 35 bp, Glycine max
  source 1..35: mol_type = genomic DNA
tagagtacataataatgttgatgttgagggtgaga

SEQ ID NO: 981 - DNA, 35 bp, Glycine max
  source 1..35: mol_type = genomic DNA
tagataagatcataagattgagaataagatttggg

SEQ ID NO: 982 - DNA, 35 bp, Glycine max
  source 1..35: mol_type = genomic DNA
tcgatgagacaataatatgaaagagatgagtggga

SEQ ID NO: 983 - DNA, 35 bp, Zea mays
  source 1..35: mol_type = genomic DNA
aaaaacagaaaaaaatattgaaggtatgggtggta

SEQ ID NO: 984 - DNA, 35 bp, Zea mays
  source 1..35: mol_type = genomic DNA
aaaagaagatagtgatgatgaagaaatgaaagtga

SEQ ID NO: 985 - DNA, 35 bp, Zea mays
  source 1..35: mol_type = genomic DNA
aaaagaagcaacaaatgctgaaggtaagagctgga

SEQ ID NO: 986 - DNA, 35 bp, Zea mays
  source 1..35: mol_type = genomic DNA
aaaataaaacaataaagttgaaaatcacagtgaca

SEQ ID NO: 987 - DNA, 35 bp, Zea mays
  source 1..35: mol_type = genomic DNA
aaaataagaacataagatagaaaatgagaaaggga

SEQ ID NO: 988 - DNA, 35 bp, Zea mays
  source 1..35: mol_type = genomic DNA
aaaataagatgttactggtgaggatcagaagggaa

SEQ ID NO: 989 - DNA, 35 bp, Zea mays
  source 1..35: mol_type = genomic DNA
aaaggaagatagtaatgatgaagaaatgaaagtga

SEQ ID NO: 990 - DNA, 35 bp, Zea mays
  source 1..35: mol_type = genomic DNA
aacaaaagaaaatcatattgaagatatgtgaggag

SEQ ID NO: 991 - DNA, 35 bp, Zea mays
  source 1..35: mol_type = genomic DNA
aacaacaaattagagggttggagataagagtagga

SEQ ID NO: 992 - DNA, 35 bp, Zea mays
  source 1..35: mol_type = genomic DNA
aagaaaagaaaaaaaggttgaagaaaagtggttgt

SEQ ID NO: 993 - DNA, 35 bp, Zea mays
  source 1..35: mol_type = genomic DNA
aagaaaagaaacaaatgatgaagagaataagggaa

SEQ ID NO: 994 - DNA, 35 bp, Zea mays
  source 1..35: mol_type = genomic DNA
aagaaaagaaagaaaggaagaagaaaaaagaggga

SEQ ID NO: 995 - DNA, 35 bp, Zea mays
  source 1..35: mol_type = genomic DNA
aagaaaagctgaaaaagtgaaagctaaaagtggaa

SEQ ID NO: 996 - DNA, 35 bp, Zea mays
  source 1..35: mol_type = genomic DNA
aagagaagagaagaatggtaaagagaagagaaggt

SEQ ID NO: 997 - DNA, 35 bp, Zea mays
  source 1..35: mol_type = genomic DNA
aagagaagaggatactttagaagagaagatggtga

SEQ ID NO: 998 - DNA, 35 bp, Zea mays
  source 1..35: mol_type = genomic DNA
aagagcgcaaaagaatgctgaagatgagagttgca

SEQ ID NO: 999 - DNA, 35 bp, Zea mays
  source 1..35: mol_type = genomic DNA
aagataagaaagaatcgtttaagataagagagaat

SEQ ID NO: 1000 - DNA, 35 bp, Zea mays
  source 1..35: mol_type = genomic DNA
aagataagacaataaagtataaaataagaggatgg

SEQ ID NO: 1001 - DNA, 35 bp, Zea mays
  source 1..35: mol_type = genomic DNA
aagataagagaatattttttaagataagatggatc

SEQ ID NO: 1002 - DNA, 35 bp, Zea mays
  source 1..35: mol_type = genomic DNA
aagataagagagaatttgttaagataagagagagt

SEQ ID NO: 1003 - DNA, 35 bp, Zea mays
  source 1..35: mol_type = genomic DNA
aagataagataaaatcggttaagataagatagata

SEQ ID NO: 1004 - DNA, 35 bp, Zea mays
  source 1..35: mol_type = genomic DNA
aagataagataaatcttttcaagataagatgagaa

SEQ ID NO: 1005 - DNA, 35 bp, Zea mays
  source 1..35: mol_type = genomic DNA
aagataagataaattcttttaagataagaatggat

SEQ ID NO: 1006 - DNA, 35 bp, Zea mays
  source 1..35: mol_type = genomic DNA
aagataagataagttcttttaagataagaatggat

SEQ ID NO: 1007 - DNA, 35 bp, Zea mays
  source 1..35: mol_type = genomic DNA
aagataagatagaatctttcaagataagaatggat

SEQ ID NO: 1008 - DNA, 35 bp, Zea mays
  source 1..35: mol_type = genomic DNA
aagataagatagatttttttaagataagaatggat

SEQ ID NO: 1009 - DNA, 35 bp, Zea mays
  source 1..35: mol_type = genomic DNA
aagataagatgaatcttattaaggtaagagagggt

SEQ ID NO: 1010 - DNA, 35 bp, Zea mays
  source 1..35: mol_type = genomic DNA
aagataagatggaactatttaagataagagagagt

SEQ ID NO: 1011 - DNA, 35 bp, Zea mays
  source 1..35: mol_type = genomic DNA
aagataagttaacaaggttcaagatgcgagaaaga

SEQ ID NO: 1012 - DNA, 35 bp, Zea mays
  source 1..35: mol_type = genomic DNA
aagataatataacgatgatgagtaaacgggtggaa

SEQ ID NO: 1013 - DNA, 35 bp, Zea mays
  source 1..35: mol_type = genomic DNA
aagatatgctatgactgttgaagaaaagaatgaga

SEQ ID NO: 1014 - DNA, 35 bp, Zea mays
  source 1..35: mol_type = genomic DNA
aagatcacgtaaaaaggttgatgacaagcgtgcgg

SEQ ID NO: 1015 - DNA, 35 bp, Zea mays
  source 1..35: mol_type = genomic DNA
aagattagaaaagaagcttgatgaaatgagcgaga

SEQ ID NO: 1016 - DNA, 35 bp, Zea mays
  source 1..35: mol_type = genomic DNA
aagattagaaaagaagcttgatgaaatgagtgaga

SEQ ID NO: 1017 - DNA, 35 bp, Zea mays
  source 1..35: mol_type = genomic DNA
aagattagaaaagaagcttgatgaagtgagtgaga

SEQ ID NO: 1018 - DNA, 35 bp, Zea mays
  source 1..35: mol_type = genomic DNA
aagattagaaaataagcttgataaagtgagtgaga

SEQ ID NO: 1019 - DNA, 35 bp, Zea mays
  source 1..35: mol_type = genomic DNA
aagctaaaatcttaatgtagatgagaaacatggga

SEQ ID NO: 1020 - DNA, 35 bp, Zea mays
  source 1..35: mol_type = genomic DNA
aaggaaagaaactaatgttcaagctaactgagggc

SEQ ID NO: 1021 - DNA, 35 bp, Zea mays
  source 1..35: mol_type = genomic DNA
aagggcacaaaaaaatgctgaagatgagagttgca

SEQ ID NO: 1022 - DNA, 35 bp, Zea mays
  source 1..35: mol_type = genomic DNA
aagggcacaaaagaatgctgaagatgagagttgca

SEQ ID NO: 1023 - DNA, 35 bp, Zea mays
  source 1..35: mol_type = genomic DNA
aagggcacaaaagaatgttgaagacgagagttgca

SEQ ID NO: 1024 - DNA, 35 bp, Zea mays
  source 1..35: mol_type = genomic DNA
aagggcacaaaagaatgttgaagatgagagctgca

SEQ ID NO: 1025 - DNA, 35 bp, Zea mays
  source 1..35: mol_type = genomic DNA
aagggcacaaaagaatgttgaagatgagagttgca

SEQ ID NO: 1026 - DNA, 35 bp, Zea mays
  source 1..35: mol_type = genomic DNA
aagggcataaaagaatgctgaagatgagagttgca

SEQ ID NO: 1027 - DNA, 35 bp, Zea mays
  source 1..35: mol_type = genomic DNA
aagggcgcaaaataatgatgaagatgagagttgca

SEQ ID NO: 1028 - DNA, 35 bp, Zea mays
  source 1..35: mol_type = genomic DNA
aaggtaacgtaataaaagtgaagaaaaaagagggg

SEQ ID NO: 1029 - DNA, 35 bp, Zea mays
  source 1..35: mol_type = genomic DNA
aaggtcgcaaaagaatgctgaagatgagagttgca

SEQ ID NO: 1030 - DNA, 35 bp, Zea mays
  source 1..35: mol_type = genomic DNA
aagtaaagataaggatgttgaagccaagaacagga

SEQ ID NO: 1031 - DNA, 35 bp, Zea mays
  source 1..35: mol_type = genomic DNA
aagtaaagataaggatgttgaagccaaggatagga

SEQ ID NO: 1032 - DNA, 35 bp, Zea mays
  source 1..35: mol_type = genomic DNA
aagtaaagataaggatgttgaagccaaggatatga

SEQ ID NO: 1033 - DNA, 35 bp, Zea mays
  source 1..35: mol_type = genomic DNA
aagttaagataataatgtgaaaagaggtagaggga

SEQ ID NO: 1034 - DNA, 35 bp, Zea mays
  source 1..35: mol_type = genomic DNA
aataaaaaataataatattaaaaatactagtgaga

SEQ ID NO: 1035 - DNA, 35 bp, Zea mays
  source 1..35: mol_type = genomic DNA
aataatagataataatgttgaagatagtagagttc

SEQ ID NO: 1036 - DNA, 35 bp, Zea mays
  source 1..35: mol_type = genomic DNA
aatataagttcatcatgttgaatgcgagagggggg

SEQ ID NO: 1037 - DNA, 35 bp, Zea mays
  source 1..35: mol_type = genomic DNA
aatttaaaataataatggtgaaaatgatagtgcga

SEQ ID NO: 1038 - DNA, 35 bp, Zea mays
  source 1..35: mol_type = genomic DNA
acgacgagaagacaatggtgaaggtaagagtggag

SEQ ID NO: 1039 - DNA, 35 bp, Zea mays
  source 1..35: mol_type = genomic DNA
actattaaaaaatcatgttgatgctatgagaggga

SEQ ID NO: 1040 - DNA, 35 bp, Zea mays
  source 1..35: mol_type = genomic DNA
aggaaaagaaaataaaattaaggaaaagagagaga

SEQ ID NO: 1041 - DNA, 35 bp, Zea mays
  source 1..35: mol_type = genomic DNA
aggataaaattacaatgtggaaaacaagaaagggg

SEQ ID NO: 1042 - DNA, 35 bp, Zea mays
  source 1..35: mol_type = genomic DNA
aggataagataaaacttttcaagataagatgagaa

SEQ ID NO: 1043 - DNA, 35 bp, Zea mays
  source 1..35: mol_type = genomic DNA
aggataagataaaatcttttaagataagaatggat

SEQ ID NO: 1044 - DNA, 35 bp, Zea mays
  source 1..35: mol_type = genomic DNA
aggataagataaatattttcaagataagatgagaa

SEQ ID NO: 1045 - DNA, 35 bp, Zea mays
  source 1..35: mol_type = genomic DNA
aggcaagaataagaaagttgaagataaaagtggtc

SEQ ID NO: 1046 - DNA, 35 bp, Zea mays
  source 1..35: mol_type = genomic DNA
aggcaagaataataaagtcgaagataaaagtggtc

SEQ ID NO: 1047 - DNA, 35 bp, Zea mays
  source 1..35: mol_type = genomic DNA
aggcaaggataagaaagtcgaagataaaagtggtc

SEQ ID NO: 1048 - DNA, 35 bp, Zea mays
  source 1..35: mol_type = genomic DNA
atgataaaataataatgttaaaaattacatagtga

SEQ ID NO: 1049 - DNA, 35 bp, Zea mays
  source 1..35: mol_type = genomic DNA
atgataagatcattatgttaatgagaacagggaga

SEQ ID NO: 1050 - DNA, 35 bp, Zea mays
  source 1..35: mol_type = genomic DNA
atgtaaagataaggatgttgaagccaaggatagga

SEQ ID NO: 1051 - DNA, 35 bp, Zea mays
  source 1..35: mol_type = genomic DNA
caattcagataataaagtagaataaaatagaggga

SEQ ID NO: 1052 - DNA, 35 bp, Zea mays
  source 1..35: mol_type = genomic DNA
cagcaaagttgatcttgatgaagacaagagtggaa

SEQ ID NO: 1053 - DNA, 35 bp, Zea mays
  source 1..35: mol_type = genomic DNA
gagagaagatgataatgttggagaagaatgtgaca

SEQ ID NO: 1054 - DNA, 35 bp, Zea mays
  source 1..35: mol_type = genomic DNA
gagatcagataaaaattctgaaggaaaagatggga

SEQ ID NO: 1055 - DNA, 35 bp, Zea mays
  source 1..35: mol_type = genomic DNA
gagatgagaaacaaatgtagaccaaaagagtgaga

SEQ ID NO: 1056 - DNA, 35 bp, Zea mays
  source 1..35: mol_type = genomic DNA
gaggtaagatcagaatgctgatgatgatcgtggaa

SEQ ID NO: 1057 - DNA, 35 bp, Zea mays
  source 1..35: mol_type = genomic DNA
tagataagataagattgtaacagataagtacgaga

SEQ ID NO: 1058 - DNA, 35 bp, Zea mays
  source 1..35: mol_type = genomic DNA
tagataagataggattgtaacagataagtatgaga

SEQ ID NO: 1059 - DNA, 35 bp, Zea mays
  source 1..35: mol_type = genomic DNA
tattaaagaaaatcatgttgatgctatgagaggga

SEQ ID NO: 1060 - DNA, 35 bp, Zea mays
  source 1..35: mol_type = genomic DNA
tggagaagaaaaaaaagttgcagatcaaagaggga

SEQ ID NO: 1061 - DNA, 35 bp, Zea mays
  source 1..35: mol_type = genomic DNA
ttgtaaaaaaaataatgctgaagttgagagtggca

SEQ ID NO: 1062 - DNA, 24 bp, Zea mays
  source 1..24: mol_type = genomic DNA
agctgcgaccgccttctttggcag

SEQ ID NO: 1063 - DNA, 24 bp, Zea mays
  source 1..24: mol_type = genomic DNA
atcttagaacgaagtcttcgaaag

SEQ ID NO: 1064 - DNA, 24 bp, Zea mays
  source 1..24: mol_type = genomic DNA
atcttagaccctcttctttggtag

SEQ ID NO: 1065 - DNA, 24 bp, Zea mays
  source 1..24: mol_type = genomic DNA
atcttggaccgccgtcttatcaag

SEQ ID NO: 1066 - DNA, 24 bp, Zea mays
  source 1..24: mol_type = genomic DNA
cacctagaccaccttcttttaggg

SEQ ID NO: 1067 - DNA, 24 bp, Zea mays
  source 1..24: mol_type = genomic DNA
caccttgatcgccttctttgaaac

SEQ ID NO: 1068 - DNA, 24 bp, Zea mays
  source 1..24: mol_type = genomic DNA
cactgagaccggctcgtttgcaag

SEQ ID NO: 1069 - DNA, 24 bp, Zea mays
  source 1..24: mol_type = genomic DNA
cactgatgcccccatctttgaaag

SEQ ID NO: 1070 - DNA, 24 bp, Zea mays
  source 1..24: mol_type = genomic DNA
cacttagatcgtcttctttgaaac

SEQ ID NO: 1071 - DNA, 24 bp, Zea mays
  source 1..24: mol_type = genomic DNA
cacttcgatcgccttcctcgacag

SEQ ID NO: 1072 - DNA, 24 bp, Zea mays
  source 1..24: mol_type = genomic DNA
cacttggaacgccttcctagaaac

SEQ ID NO: 1073 - DNA, 24 bp, Zea mays
  source 1..24: mol_type = genomic DNA
cactttgaccgcttcctttggcag

SEQ ID NO: 1074 - DNA, 24 bp, Zea mays
  source 1..24: mol_type = genomic DNA
catctagaccggcctctttgaaag

SEQ ID NO: 1075 - DNA, 24 bp, Zea mays
  source 1..24: mol_type = genomic DNA
cattaactccgcattctttgaaag

SEQ ID NO: 1076 - DNA, 24 bp, Zea mays
  source 1..24: mol_type = genomic DNA
cccgtggaccgccttttttgcgag

SEQ ID NO: 1077 - DNA, 24 bp, Zea mays
  source 1..24: mol_type = genomic DNA
cccgtgggccgccttctgtgcaag

SEQ ID NO: 1078 - DNA, 24 bp, Zea mays
  source 1..24: mol_type = genomic DNA
cccgtggtccgccttctgtgcaag

SEQ ID NO: 1079 - DNA, 24 bp, Zea mays
  source 1..24: mol_type = genomic DNA
cgcttcgaccgcctcctctggcag

SEQ ID NO: 1080 - DNA, 24 bp, Zea mays
  source 1..24: mol_type = genomic DNA
ctataagtccaccctctttgaatg

SEQ ID NO: 1081 - DNA, 24 bp, Zea mays
  source 1..24: mol_type = genomic DNA
ctatcaaaccgacttatttgaaag

SEQ ID NO: 1082 - DNA, 24 bp, Zea mays
  source 1..24: mol_type = genomic DNA
ctcataccccgccatcaatgaaag

SEQ ID NO: 1083 - DNA, 24 bp, Zea mays
  source 1..24: mol_type = genomic DNA
ctcatagaccgccttggttgagaa

SEQ ID NO: 1084 - DNA, 24 bp, Zea mays
  source 1..24: mol_type = genomic DNA
ctcatagaccgcgatgttagacag

SEQ ID NO: 1085 - DNA, 24 bp, Zea mays
  source 1..24: mol_type = genomic DNA
ctcatcgactgccctcttgcaaag

SEQ ID NO: 1086 - DNA, 24 bp, Zea mays
  source 1..24: mol_type = genomic DNA
ctcatggaccggctccttcgacag

SEQ ID NO: 1087 - DNA, 24 bp, Zea mays
  source 1..24: mol_type = genomic DNA
ctcattggcctccatctctgaaag

SEQ ID NO: 1088 - DNA, 24 bp, Zea mays
  source 1..24: mol_type = genomic DNA
ctccaaaatcgccttcaatgaaag

SEQ ID NO: 1089 - DNA, 24 bp, Zea mays
  source 1..24: mol_type = genomic DNA
ctccaagaccgccatacttgagag

SEQ ID NO: 1090 - DNA, 24 bp, Zea mays
  source 1..24: mol_type = genomic DNA
ctcctacaacgacatctttgaaag

SEQ ID NO: 1091 - DNA, 24 bp, Zea mays
  source 1..24: mol_type = genomic DNA
ctcctactccgccttctttgaagc

SEQ ID NO: 1092 - DNA, 24 bp, Zea mays
  source 1..24: mol_type = genomic DNA
ctcctagacagccttcccgggaag

SEQ ID NO: 1093 - DNA, 24 bp, Zea mays
  source 1..24: mol_type = genomic DNA
ctcctagacctccacctttgcatg

SEQ ID NO: 1094 - DNA, 24 bp, Zea mays
  source 1..24: mol_type = genomic DNA
ctcctaggccaccacctttgaaag

SEQ ID NO: 1095 - DNA, 24 bp, Zea mays
  source 1..24: mol_type = genomic DNA
ctcctagtccgcctgcagtggaag

SEQ ID NO: 1096 - DNA, 24 bp, Zea mays
  source 1..24: mol_type = genomic DNA
ctcctcgaccgcctccctcgaagg

SEQ ID NO: 1097 - DNA, 24 bp, Zea mays
  source 1..24: mol_type = genomic DNA
ctccttaaacgccttctgtgacag

SEQ ID NO: 1098 - DNA, 24 bp, Zea mays
  source 1..24: mol_type = genomic DNA
ctccttgaccgccttctttatcag

SEQ ID NO: 1099 - DNA, 24 bp, Zea mays
  source 1..24: mol_type = genomic DNA
ctcctttaccgtctcctttaaaag

SEQ ID NO: 1100 - DNA, 24 bp, Zea mays
  source 1..24: mol_type = genomic DNA
ctcgaagaccaccttcttccacag

SEQ ID NO: 1101 - DNA, 24 bp, Zea mays
  source 1..24: mol_type = genomic DNA
ctcggaacccgactactttgaaag

SEQ ID NO: 1102 - DNA, 24 bp, Zea mays
  source 1..24: mol_type = genomic DNA
ctcgtacaacgccttcatcggaag

SEQ ID NO: 1103 - DNA, 24 bp, Zea mays
  source 1..24: mol_type = genomic DNA
ctcgtagtccgccttcttgtaccg

SEQ ID NO: 1104 - DNA, 24 bp, Zea mays
  source 1..24: mol_type = genomic DNA
ctcgtagtccgccttcttgtagcg

SEQ ID NO: 1105 - DNA, 24 bp, Zea mays
  source 1..24: mol_type = genomic DNA
ctcgtcgtccgccgtcattgcaag

SEQ ID NO: 1106 - DNA, 24 bp, Zea mays
  source 1..24: mol_type = genomic DNA
ctcgtcgtccgccgtcgttgcaag

SEQ ID NO: 1107 - DNA, 24 bp, Zea mays
  source 1..24: mol_type = genomic DNA
ctctaaaatcgccttcaatgaaag

SEQ ID NO: 1108 - DNA, 24 bp, Zea mays
  source 1..24: mol_type = genomic DNA
ctctaagaccgacttttgtgaatg

SEQ ID NO: 1109 - DNA, 24 bp, Zea mays
  source 1..24: mol_type = genomic DNA
ctctcagaccgccatcgaggaatg

SEQ ID NO: 1110 - DNA, 24 bp, Zea mays
  source 1..24: mol_type = genomic DNA
ctctcaggcagcctgctttggagg

SEQ ID NO: 1111 - DNA, 24 bp, Zea mays
  source 1..24: mol_type = genomic DNA
ctctcagtccgccttcttggacga

SEQ ID NO: 1112 - DNA, 24 bp, Zea mays
  source 1..24: mol_type = genomic DNA
ctctgatacatccttctctgacag

SEQ ID NO: 1113 - DNA, 24 bp, Zea mays
  source 1..24: mol_type = genomic DNA
ctctgcgaccgcctgctccggaag

SEQ ID NO: 1114 - DNA, 24 bp, Zea mays
  source 1..24: mol_type = genomic DNA
ctctggcaccaccgtctatgaaag

SEQ ID NO: 1115 - DNA, 24 bp, Zea mays
  source 1..24: mol_type = genomic DNA
ctcttagaccctcttcggttacag

SEQ ID NO: 1116 - DNA, 24 bp, Zea mays
  source 1..24: mol_type = genomic DNA
ctcttagaccgtctcctgtggaat

SEQ ID NO: 1117 - DNA, 24 bp, Zea mays
  source 1..24: mol_type = genomic DNA
ctcttagatcgtcatcgtggagag

SEQ ID NO: 1118 - DNA, 24 bp, Zea mays
  source 1..24: mol_type = genomic DNA
ctcttatgcagccatatctgaaag

SEQ ID NO: 1119 - DNA, 24 bp, Zea mays
  source 1..24: mol_type = genomic DNA
ctcttcgaccgacagctttgcaaa

SEQ ID NO: 1120 - DNA, 24 bp, Zea mays
  source 1..24: mol_type = genomic DNA
ctcttcgacggccagctttacaag

SEQ ID NO: 1121 - DNA, 24 bp, Zea mays
  source 1..24: mol_type = genomic DNA
ctcttcgatcgccatcgtggagag

SEQ ID NO: 1122 - DNA, 24 bp, Zea mays
  source 1..24: mol_type = genomic DNA
ctcttcgcccaccttcttggagcg

SEQ ID NO: 1123 - DNA, 24 bp, Zea mays
  source 1..24: mol_type = genomic DNA
ctcttcgctcgccgtctccgaaag

SEQ ID NO: 1124 - DNA, 24 bp, Zea mays
  source 1..24: mol_type = genomic DNA
ctcttcggccgccatctttggtaa

SEQ ID NO: 1125 - DNA, 24 bp, Zea mays
  source 1..24: mol_type = genomic DNA
ctcttggaacgcgttccttgatgg

SEQ ID NO: 1126 - DNA, 24 bp, Zea mays
  source 1..24: mol_type = genomic DNA
ctcttgtaccgccttttaaggaag

SEQ ID NO: 1127 - DNA, 24 bp, Zea mays
  source 1..24: mol_type = genomic DNA
ctctttgaccgccttctcggagcg

SEQ ID NO: 1128 - DNA, 24 bp, Zea mays
  source 1..24: mol_type = genomic DNA
ctctttggccgccttcttgtaaac

SEQ ID NO: 1129 - DNA, 24 bp, Zea mays
  source 1..24: mol_type = genomic DNA
ctctttgtcaatcttctttgaaaa

SEQ ID NO: 1130 - DNA, 24 bp, Zea mays
  source 1..24: mol_type = genomic DNA
ctgtttggccgcctgccatgaaag

SEQ ID NO: 1131 - DNA, 24 bp, Zea mays
  source 1..24: mol_type = genomic DNA
ctttcagaccaccagcttcgaaag

SEQ ID NO: 1132 - DNA, 24 bp, Zea mays
  source 1..24: mol_type = genomic DNA
ctttcagaccaccagctttgagag

SEQ ID NO: 1133 - DNA, 24 bp, Zea mays
  source 1..24: mol_type = genomic DNA
ctttcagaccgccagctctgagag

SEQ ID NO: 1134 - DNA, 24 bp, Zea mays
  source 1..24: mol_type = genomic DNA
ctttcagacctccatctttcaaag

SEQ ID NO: 1135 - DNA, 24 bp, Zea mays
  source 1..24: mol_type = genomic DNA
cttttagaccaccagctctgagag

SEQ ID NO: 1136 - DNA, 24 bp, Zea mays
  source 1..24: mol_type = genomic DNA
cttttagaccaccagcttcgagag

SEQ ID NO: 1137 - DNA, 24 bp, Zea mays
  source 1..24: mol_type = genomic DNA
cttttagaccgcatcttttgcaag

SEQ ID NO: 1138 - DNA, 24 bp, Zea mays
  source 1..24: mol_type = genomic DNA
cttttaggccgcctgcttagagag

SEQ ID NO: 1139 - DNA, 24 bp, Zea mays
  source 1..24: mol_type = genomic DNA
cttttatacagccccctttgaaag

SEQ ID NO: 1140 - DNA, 24 bp, Zea mays
  source 1..24: mol_type = genomic DNA
cttttataccgctttgtttcaaag

SEQ ID NO: 1141 - DNA, 24 bp, Zea mays
  source 1..24: mol_type = genomic DNA
ctttttgcccagcttctttgaaaa

SEQ ID NO: 1142 - DNA, 24 bp, Zea mays
  source 1..24: mol_type = genomic DNA
gacatagacctccatcttggaaag

SEQ ID NO: 1143 - DNA, 24 bp, Zea mays
  source 1..24: mol_type = genomic DNA
gtcttcgaccgccttcttcaaatg

SEQ ID NO: 1144 - DNA, 24 bp, Zea mays
  source 1..24: mol_type = genomic DNA
ttatttggccgccttcgttgaagg

SEQ ID NO: 1145 - DNA, 24 bp, Zea mays
  source 1..24: mol_type = genomic DNA
ttcgtagcccgcctccttcaaaag

SEQ ID NO: 1146 - DNA, 24 bp, Zea mays
  source 1..24: mol_type = genomic DNA
ttctaattccgcattctttgaaag

SEQ ID NO: 1147 - DNA, 24 bp, Zea mays
  source 1..24: mol_type = genomic DNA
ttcttatatcgccttctttgatac

SEQ ID NO: 1148 - DNA, 24 bp, Zea mays
  source 1..24: mol_type = genomic DNA
ttcttttaccgtcttgtttgaaag

SEQ ID NO: 1149 - DNA, 24 bp, Zea mays
  source 1..24: mol_type = genomic DNA
ttgttggaccgcctactgggaaag

SEQ ID NO: 1150 - DNA, 24 bp, Oryza sativa
  source 1..24: mol_type = genomic DNA
agtttaggccgcgttctttgcaag

SEQ ID NO: 1151 - DNA, 24 bp, Oryza sativa
  source 1..24: mol_type = genomic DNA
atctgagaatgcctcctttcaaag

SEQ ID NO: 1152 - DNA, 24 bp, Oryza sativa
  source 1..24: mol_type = genomic DNA
atcttagaatgccttctgagtaag

SEQ ID NO: 1153 - DNA, 24 bp, Oryza sativa
  source 1..24: mol_type = genomic DNA
atcttcgacctacttctttgaccg

SEQ ID NO: 1154 - DNA, 24 bp, Oryza sativa
  source 1..24: mol_type = genomic DNA
atcttgaacctcgttctttgagag

SEQ ID NO: 1155 - DNA, 24 bp, Oryza sativa
  source 1..24: mol_type = genomic DNA
atcttggacctccatgtttgaaaa

SEQ ID NO: 1156 - DNA, 24 bp, Oryza sativa
  source 1..24: mol_type = genomic DNA
atgtcggaccaccttctttgcaag

SEQ ID NO: 1157 - DNA, 24 bp, Oryza sativa
  source 1..24: mol_type = genomic DNA
cacctagaacgcctacatagaaag

SEQ ID NO: 1158 - DNA, 24 bp, Oryza sativa
  source 1..24: mol_type = genomic DNA
cacctagaccgccgtcgttgttag

SEQ ID NO: 1159 - DNA, 24 bp, Oryza sativa
  source 1..24: mol_type = genomic DNA
cactaaaaagggcttctttgaaag

SEQ ID NO: 1160 - DNA, 24 bp, Oryza sativa
  source 1..24: mol_type = genomic DNA
cacttagaccgccttcatcagcag

SEQ ID NO: 1161 - DNA, 24 bp, Oryza sativa
  source 1..24: mol_type = genomic DNA
cacttagacctcctttgttgactg

SEQ ID NO: 1162 - DNA, 24 bp, Oryza sativa
  source 1..24: mol_type = genomic DNA
cacttagcctgcgttctttcaaaa

SEQ ID NO: 1163 - DNA, 24 bp, Oryza sativa
  source 1..24: mol_type = genomic DNA
cacttagctcacctttttggaaag

SEQ ID NO: 1164 - DNA, 24 bp, Oryza sativa
  source 1..24: mol_type = genomic DNA
cacttgcacggcgttctttgaaag

SEQ ID NO: 1165 - DNA, 24 bp, Oryza sativa
  source 1..24: mol_type = genomic DNA
cccatagacctccttacttgagag

SEQ ID NO: 1166 - DNA, 24 bp, Oryza sativa
  source 1..24: mol_type = genomic DNA
cccgtagaccggctttcgtgaaag

SEQ ID NO: 1167 - DNA, 24 bp, Oryza sativa
  source 1..24: mol_type = genomic DNA
cccttacaccgtcttctttgacga

SEQ ID NO: 1168 - DNA, 24 bp, Oryza sativa
  source 1..24: mol_type = genomic DNA
ccctttcaccaccttcttctaaag

SEQ ID NO: 1169 - DNA, 24 bp, Oryza sativa
  source 1..24: mol_type = genomic DNA
cgcttacaccccctacttttaaaa

SEQ ID NO: 1170 - DNA, 24 bp, Oryza sativa
  source 1..24: mol_type = genomic DNA
cgcttagcccgccaactttgcaaa

SEQ ID NO: 1171 - DNA, 24 bp, Oryza sativa
  source 1..24: mol_type = genomic DNA
cggttagaccgcctggttttagag

SEQ ID NO: 1172 - DNA, 24 bp, Oryza sativa
  source 1..24: mol_type = genomic DNA
ctataggagggctttctttgaaag

SEQ ID NO: 1173 - DNA, 24 bp, Oryza sativa
  source 1..24: mol_type = genomic DNA
ctatatgaccgtcttcattgaaaa

SEQ ID NO: 1174 - DNA, 24 bp, Oryza sativa
  source 1..24: mol_type = genomic DNA
ctatcaaaccgcctcctttggtag

SEQ ID NO: 1175 - DNA, 24 bp, Oryza sativa
  source 1..24: mol_type = genomic DNA
ctattacaccgccgactttaaacg

SEQ ID NO: 1176 - DNA, 24 bp, Oryza sativa
  source 1..24: mol_type = genomic DNA
ctattctaccgaaatctttgaaag

SEQ ID NO: 1177 - DNA, 24 bp, Oryza sativa
  source 1..24: mol_type = genomic DNA
ctcaaaggccgctttctttggatg

SEQ ID NO: 1178 - DNA, 24 bp, Oryza sativa
  source 1..24: mol_type = genomic DNA
ctcatagtccacctgttttcaaag

SEQ ID NO: 1179 - DNA, 24 bp, Oryza sativa
  source 1..24: mol_type = genomic DNA
ctcatatagcgcctactatgagag

SEQ ID NO: 1180 - DNA, 24 bp, Oryza sativa
  source 1..24: mol_type = genomic DNA
ctcatcgacagccttttttcaaaa

SEQ ID NO: 1181 - DNA, 24 bp, Oryza sativa
  source 1..24: mol_type = genomic DNA
ctcatcgatccccttctataaaag

SEQ ID NO: 1182 - DNA, 24 bp, Oryza sativa
  source 1..24: mol_type = genomic DNA
ctcccaggctgccttctctgcaag

SEQ ID NO: 1183 - DNA, 24 bp, Oryza sativa
  source 1..24: mol_type = genomic DNA
ctcccgcagcgccttctttgagag

SEQ ID NO: 1184 - DNA, 24 bp, Oryza sativa
  source 1..24: mol_type = genomic DNA
ctcctacacaaccttcttggagag

SEQ ID NO: 1185 - DNA, 24 bp, Oryza sativa
  source 1..24: mol_type = genomic DNA
ctcctacaccgactcctctgcaag

SEQ ID NO: 1186 - DNA, 24 bp, Oryza sativa
  source 1..24: mol_type = genomic DNA
ctcctacaccgactccttcgcaag

SEQ ID NO: 1187 - DNA, 24 bp, Oryza sativa
  source 1..24: mol_type = genomic DNA
ctcctacaccgacttgtcagaaag

SEQ ID NO: 1188 - DNA, 24 bp, Oryza sativa
  source 1..24: mol_type = genomic DNA
ctcctagaacttcttctgagaaag

SEQ ID NO: 1189 - DNA, 24 bp, Oryza sativa
  source 1..24: mol_type = genomic DNA
ctcctagtcctactgctatgaaag

SEQ ID NO: 1190 - DNA, 24 bp, Oryza sativa
  source 1..24: mol_type = genomic DNA
ctccttgaccaccttctccgaatg

SEQ ID NO: 1191 - DNA, 24 bp, Oryza sativa
  source 1..24: mol_type = genomic DNA
ctcgtagtccgccttcttgtaccg

SEQ ID NO: 1192 - DNA, 24 bp, Oryza sativa
  source 1..24: mol_type = genomic DNA
ctcgtcacccgccttcttggaaac

SEQ ID NO: 1193 - DNA, 24 bp, Oryza sativa
  source 1..24: mol_type = genomic DNA
ctcgtcgacctcctcctttgtgag

SEQ ID NO: 1194 - DNA, 24 bp, Oryza sativa
  source 1..24: mol_type = genomic DNA
ctctaagaccccatttcttggaag

SEQ ID NO: 1195 - DNA, 24 bp, Oryza sativa
  source 1..24: mol_type = genomic DNA
ctctaagccccccttttctgtaag

SEQ ID NO: 1196 - DNA, 24 bp, Oryza sativa
  source 1..24: mol_type = genomic DNA
ctctcagacaagcttttttgtaag

SEQ ID NO: 1197 - DNA, 24 bp, Oryza sativa
  source 1..24: mol_type = genomic DNA
ctctgcgtctgccttctttgacac

SEQ ID NO: 1198 - DNA, 24 bp, Oryza sativa
  source 1..24: mol_type = genomic DNA
ctctgggatcgcgtgctttcaaag

SEQ ID NO: 1199 - DNA, 24 bp, Oryza sativa
  source 1..24: mol_type = genomic DNA
ctctgtcaccatcttctttgcaag

SEQ ID NO: 1200 - DNA, 24 bp, Oryza sativa
  source 1..24: mol_type = genomic DNA
ctcttacgcccccatttttgaagg

SEQ ID NO: 1201 - DNA, 24 bp, Oryza sativa
  source 1..24: mol_type = genomic DNA
ctcttagaatgcatgctttcaatg

SEQ ID NO: 1202 - DNA, 24 bp, Oryza sativa
  source 1..24: mol_type = genomic DNA
ctcttagacacccacctatgaaat

SEQ ID NO: 1203 - DNA, 24 bp, Oryza sativa
  source 1..24: mol_type = genomic DNA
ctcttagacagcttacattgatgg

SEQ ID NO: 1204 - DNA, 24 bp, Oryza sativa
  source 1..24: mol_type = genomic DNA
ctcttagaccaccaggtttaaagg

SEQ ID NO: 1205 - DNA, 24 bp, Oryza sativa
  source 1..24: mol_type = genomic DNA
ctcttagaccgccatgtagcaatg

SEQ ID NO: 1206 - DNA, 24 bp, Oryza sativa
  source 1..24: mol_type = genomic DNA
ctcttagaccgcgttattccgatg

SEQ ID NO: 1207 - DNA, 24 bp, Oryza sativa
  source 1..24: mol_type = genomic DNA
ctcttagacctcaatttttgatgg

SEQ ID NO: 1208 - DNA, 24 bp, Oryza sativa
  source 1..24: mol_type = genomic DNA
ctcttagacctcctaatgtgcatg

SEQ ID NO: 1209 - DNA, 24 bp, Oryza sativa
  source 1..24: mol_type = genomic DNA
ctcttagactatcttcttggaaaa

SEQ ID NO: 1210 - DNA, 24 bp, Oryza sativa
  source 1..24: mol_type = genomic DNA
ctcttaggacgccttttataaagg

SEQ ID NO: 1211 - DNA, 24 bp, Oryza sativa
  source 1..24: mol_type = genomic DNA
ctcttagttccccttcttaggtag

SEQ ID NO: 1212 - DNA, 24 bp, Oryza sativa
  source 1..24: mol_type = genomic DNA
ctcttataccgaattccatgcaag

SEQ ID NO: 1213 - DNA, 24 bp, Oryza sativa
  source 1..24: mol_type = genomic DNA
ctcttataccgaattctatgcaaa

SEQ ID NO: 1214 - DNA, 24 bp, Oryza sativa
  source 1..24: mol_type = genomic DNA
ctcttataccgcccgctctggaat

SEQ ID NO: 1215 - DNA, 24 bp, Oryza sativa
  source 1..24: mol_type = genomic DNA
ctcttccaccgcctccattgaact

SEQ ID NO: 1216 - DNA, 24 bp, Oryza sativa
  source 1..24: mol_type = genomic DNA
ctcttccactgccatcttcaaaag

SEQ ID NO: 1217 - DNA, 24 bp, Oryza sativa
  source 1..24: mol_type = genomic DNA
ctcttgcaccgactccttcgcaag

SEQ ID NO: 1218 - DNA, 24 bp, Oryza sativa
  source 1..24: mol_type = genomic DNA
ctctttgacctcgtcctctgtaag

SEQ ID NO: 1219 - DNA, 24 bp, Oryza sativa
  source 1..24: mol_type = genomic DNA
ctctttgtccgccttctttttatt

SEQ ID NO: 1220 - DNA, 24 bp, Oryza sativa
  source 1..24: mol_type = genomic DNA
ctgctgcactgccttctttggaag

SEQ ID NO: 1221 - DNA, 24 bp, Oryza sativa
  source 1..24: mol_type = genomic DNA
ctgtttgattgccatctttggaag

SEQ ID NO: 1222 - DNA, 24 bp, Oryza sativa
  source 1..24: mol_type = genomic DNA
cttatataccgccttatttgaatg

SEQ ID NO: 1223 - DNA, 24 bp, Oryza sativa
  source 1..24: mol_type = genomic DNA
cttttagagagcctcctgtaaaag

SEQ ID NO: 1224 - DNA, 24 bp, Oryza sativa
  source 1..24: mol_type = genomic DNA
cttttagagctgcttctaagaaag

SEQ ID NO: 1225 - DNA, 24 bp, Oryza sativa
  source 1..24: mol_type = genomic DNA
cttttagattgccttctatgatgg

SEQ ID NO: 1226 - DNA, 24 bp, Oryza sativa
  source 1..24: mol_type = genomic DNA
cttttagattgcctttttttaaag

SEQ ID NO: 1227 - DNA, 24 bp, Oryza sativa
  source 1..24: mol_type = genomic DNA
cttttaggacgccatctttgaata

SEQ ID NO: 1228 - DNA, 24 bp, Oryza sativa
  source 1..24: mol_type = genomic DNA
cttttaggcccctttcaatgaaag

SEQ ID NO: 1229 - DNA, 24 bp, Oryza sativa
  source 1..24: mol_type = genomic DNA
gacttaggctgcgttctttcaaag

SEQ ID NO: 1230 - DNA, 24 bp, Oryza sativa
  source 1..24: mol_type = genomic DNA
ggcttagctcggcttgtttgaaag

SEQ ID NO: 1231 - DNA, 24 bp, Oryza sativa
  source 1..24: mol_type = genomic DNA
ggcttaggctgcgttctttcaaag

SEQ ID NO: 1232 - DNA, 24 bp, Oryza sativa
  source 1..24: mol_type = genomic DNA
gtctgtgatcgccttcttcaaaag

SEQ ID NO: 1233 - DNA, 24 bp, Oryza sativa
  source 1..24: mol_type = genomic DNA
taattagacctcctattttgaaag

SEQ ID NO: 1234 - DNA, 24 bp, Oryza sativa
  source 1..24: mol_type = genomic DNA
ttcatcgaacgccttatttgaaaa

SEQ ID NO: 1235 - DNA, 24 bp, Oryza sativa
  source 1..24: mol_type = genomic DNA
ttccaagacccccttctttgttag

SEQ ID NO: 1236 - DNA, 24 bp, Oryza sativa
  source 1..24: mol_type = genomic DNA
ttcctaaaccgacacctttgaaag

SEQ ID NO: 1237 - DNA, 24 bp, Oryza sativa
  source 1..24: mol_type = genomic DNA
ttcgtcgtacgtcttctttgaaag

SEQ ID NO: 1238 - DNA, 24 bp, Oryza sativa
  source 1..24: mol_type = genomic DNA
ttcttaaaccgacacctttgagag

SEQ ID NO: 1239 - DNA, 24 bp, Oryza sativa
  source 1..24: mol_type = genomic DNA
ttctttcacggccttctctggaag

SEQ ID NO: 1240 - DNA, 24 bp, Oryza sativa
  source 1..24: mol_type = genomic DNA
ttctttgacctccttagttgaatg

SEQ ID NO: 1241 - DNA, 24 bp, Oryza sativa
  source 1..24: mol_type = genomic DNA
ttgtcaaaccgccgtctttgaaag

SEQ ID NO: 1242 - DNA, 24 bp, Glycine max
  source 1..24: mol_type = genomic DNA
aaattcgaccgcgtcctttggaag

SEQ ID NO: 1243 - DNA, 24 bp, Glycine max
  source 1..24: mol_type = genomic DNA
aacttagatggccttctttgaacg

SEQ ID NO: 1244 - DNA, 24 bp, Glycine max
  source 1..24: mol_type = genomic DNA
aaggtgggccgccttctatgaaag

SEQ ID NO: 1245 - DNA, 24 bp, Glycine max
  source 1..24: mol_type = genomic DNA
accttaggccgtattctttgaaag

SEQ ID NO: 1246 - DNA, 24 bp, Glycine max
  source 1..24: mol_type = genomic DNA
atcttacaccgacaactttgatag

SEQ ID NO: 1247 - DNA, 24 bp, Glycine max
  source 1..24: mol_type = genomic DNA
atcttagaatgcctactttcaaag

SEQ ID NO: 1248 - DNA, 24 bp, Glycine max
  source 1..24: mol_type = genomic DNA
atcttagacaaccgcctttgaaag

SEQ ID NO: 1249 - DNA, 24 bp, Glycine max
  source 1..24: mol_type = genomic DNA
atcttatatctccttgtttgaaat

SEQ ID NO: 1250 - DNA, 24 bp, Glycine max
  source 1..24: mol_type = genomic DNA
atcttatcccaccttctttgaatg

SEQ ID NO: 1251 - DNA, 24 bp, Glycine max
  source 1..24: mol_type = genomic DNA
atctttgaacactttctttcaaag

SEQ ID NO: 1252 - DNA, 24 bp, Glycine max
  source 1..24: mol_type = genomic DNA
atctttgaccacgtgctttaaaag

SEQ ID NO: 1253 - DNA, 24 bp, Glycine max
  source 1..24: mol_type = genomic DNA
atctttgacccacttttttgaaag

SEQ ID NO: 1254 - DNA, 24 bp, Glycine max
  source 1..24: mol_type = genomic DNA
atctttgaccttcttctttggaag

SEQ ID NO: 1255 - DNA, 24 bp, Glycine max
  source 1..24: mol_type = genomic DNA
atctttgagcgtattctttgaaag

SEQ ID NO: 1256 - DNA, 24 bp, Glycine max
  source 1..24: mol_type = genomic DNA
atctttgggcgcattctttgaaag

SEQ ID NO: 1257 - DNA, 24 bp, Glycine max
  source 1..24: mol_type = genomic DNA
atgttagatcgtcttcaatgaaag

SEQ ID NO: 1258 - DNA, 24 bp, Glycine max
  source 1..24: mol_type = genomic DNA
caattacccctccttctttcaaag

SEQ ID NO: 1259 - DNA, 24 bp, Glycine max
  source 1..24: mol_type = genomic DNA
cacatagaccccattctttcaaag

SEQ ID NO: 1260 - DNA, 24 bp, Glycine max
  source 1..24: mol_type = genomic DNA
cacatagacggccatgattaaaag

SEQ ID NO: 1261 - DNA, 24 bp, Glycine max
  source 1..24: mol_type = genomic DNA
cacggagacaacattctttgacag

SEQ ID NO: 1262 - DNA, 24 bp, Glycine max
  source 1..24: mol_type = genomic DNA
cacgtccaccgcctcctttggaag

SEQ ID NO: 1263 - DNA, 24 bp, Glycine max
  source 1..24: mol_type = genomic DNA
cactaatactgccatcattgagag

SEQ ID NO: 1264 - DNA, 24 bp, Glycine max
  source 1..24: mol_type = genomic DNA
cactgagaccaccttcttgcaaag

SEQ ID NO: 1265 - DNA, 24 bp, Glycine max
  source 1..24: mol_type = genomic DNA
cactgagaccgccttcttgcaaag

SEQ ID NO: 1266 - DNA, 24 bp, Glycine max
  source 1..24: mol_type = genomic DNA
cactgagcccggctacttttaaag

SEQ ID NO: 1267 - DNA, 24 bp, Glycine max
  source 1..24: mol_type = genomic DNA
cacttattcctccttccatgaagg

SEQ ID NO: 1268 - DNA, 24 bp, Glycine max
  source 1..24: mol_type = genomic DNA
cacttggaccagcttttttgaaag

SEQ ID NO: 1269 - DNA, 24 bp, Glycine max
  source 1..24: mol_type = genomic DNA
cacttgtgcggactactttgaaag

SEQ ID NO: 1270 - DNA, 24 bp, Glycine max
  source 1..24: mol_type = genomic DNA
cccaaagaccgtcttctacgaaat

SEQ ID NO: 1271 - DNA, 24 bp, Glycine max
  source 1..24: mol_type = genomic DNA
cccattgcccgccttctttgacgg

SEQ ID NO: 1272 - DNA, 24 bp, Glycine max
  source 1..24: mol_type = genomic DNA
cccctaaaacgctttctttgaaag

SEQ ID NO: 1273 - DNA, 24 bp, Glycine max
  source 1..24: mol_type = genomic DNA
cccgaagaccaccttctgttaaag

SEQ ID NO: 1274 - DNA, 24 bp, Glycine max
  source 1..24: mol_type = genomic DNA
cccgtagaccaccttctgttaaag

SEQ ID NO: 1275 - DNA, 24 bp, Glycine max
  source 1..24: mol_type = genomic DNA
cccttacaccagcttcttaaaaag

SEQ ID NO: 1276 - DNA, 24 bp, Glycine max
  source 1..24: mol_type = genomic DNA
cccttctaccaccttctttgcccg

SEQ ID NO: 1277 - DNA, 24 bp, Glycine max
  source 1..24: mol_type = genomic DNA
cccttgaacgaccttctgcgaaag

SEQ ID NO: 1278 - DNA, 24 bp, Glycine max
  source 1..24: mol_type = genomic DNA
cccttgacccgacttctttgaaag

SEQ ID NO: 1279 - DNA, 24 bp, Glycine max
  source 1..24: mol_type = genomic DNA
cgattcggcctccttctttgaagg

SEQ ID NO: 1280 - DNA, 24 bp, Glycine max
  source 1..24: mol_type = genomic DNA
cgcataaaacgtcatctctgaaag

SEQ ID NO: 1281 - DNA, 24 bp, Glycine max
  source 1..24: mol_type = genomic DNA
cgctcagtctggcttccttgatag

SEQ ID NO: 1282 - DNA, 24 bp, Glycine max
  source 1..24: mol_type = genomic DNA
cgcttagatagcattcttttaaat

SEQ ID NO: 1283 - DNA, 24 bp, Glycine max
  source 1..24: mol_type = genomic DNA
cgcttggcccaccctctttgtgag

SEQ ID NO: 1284 - DNA, 24 bp, Glycine max
  source 1..24: mol_type = genomic DNA
cgtttagaccgccttctgttaaac

SEQ ID NO: 1285 - DNA, 24 bp, Glycine max
  source 1..24: mol_type = genomic DNA
ctcaaagaacaccttcattgaaag

SEQ ID NO: 1286 - DNA, 24 bp, Glycine max
  source 1..24: mol_type = genomic DNA
ctcaaaggccaccttcttttcaag

SEQ ID NO: 1287 - DNA, 24 bp, Glycine max
  source 1..24: mol_type = genomic DNA
ctcaataacccccttctttgaaac

SEQ ID NO: 1288 - DNA, 24 bp, Glycine max
  source 1..24: mol_type = genomic DNA
ctcaatgacccacttctttggaag

SEQ ID NO: 1289 - DNA, 24 bp, Glycine max
  source 1..24: mol_type = genomic DNA
ctcaatgacccgcttctttgaaag

SEQ ID NO: 1290 - DNA, 24 bp, Glycine max
  source 1..24: mol_type = genomic DNA
ctcatagaccacctccttgtacag

SEQ ID NO: 1291 - DNA, 24 bp, Glycine max
  source 1..24: mol_type = genomic DNA
ctcatggaccgcctcctccgccag

SEQ ID NO: 1292 - DNA, 24 bp, Glycine max
  source 1..24: mol_type = genomic DNA
ctcatggactgccatctttaagag

SEQ ID NO: 1293 - DNA, 24 bp, Glycine max
  source 1..24: mol_type = genomic DNA
ctcatgggttgccttctttgaaag

SEQ ID NO: 1294 - DNA, 24 bp, Glycine max
  source 1..24: mol_type = genomic DNA
ctccaagaccggctccatggaaag

SEQ ID NO: 1295 - DNA, 24 bp, Glycine max
  source 1..24: mol_type = genomic DNA
ctcctagaccgaattcattgagtg

SEQ ID NO: 1296 - DNA, 24 bp, Glycine max
  source 1..24: mol_type = genomic DNA
ctcctagacctccttctatgcagg

SEQ ID NO: 1297 - DNA, 24 bp, Glycine max
  source 1..24: mol_type = genomic DNA
ctccttgaccatcgcctttgaagg

SEQ ID NO: 1298 - DNA, 24 bp, Glycine max
  source 1..24: mol_type = genomic DNA
ctccttggcccccttctatggaag

SEQ ID NO: 1299 - DNA, 24 bp, Glycine max
  source 1..24: mol_type = genomic DNA
ctcgtagagacccttcttgggagg

SEQ ID NO: 1300 - DNA, 24 bp, Glycine max
  source 1..24: mol_type = genomic DNA
ctctaagaacacattcattgaaag

SEQ ID NO: 1301 - DNA, 24 bp, Glycine max
  source 1..24: mol_type = genomic DNA
ctctaagacagccttggttggagg

SEQ ID NO: 1302 - DNA, 24 bp, Glycine max
  source 1..24: mol_type = genomic DNA
ctctaagagcaccatctttgatca

SEQ ID NO: 1303 - DNA, 24 bp, Glycine max
  source 1..24: mol_type = genomic DNA
ctctaatacatacttctttgaaag

SEQ ID NO: 1304 - DNA, 24 bp, Glycine max
  source 1..24: mol_type = genomic DNA
ctctaataccactttgttggaaag

SEQ ID NO: 1305 - DNA, 24 bp, Glycine max
  source 1..24: mol_type = genomic DNA
ctctaataccgccatcgatgaagg

SEQ ID NO: 1306 - DNA, 24 bp, Glycine max
  source 1..24: mol_type = genomic DNA
ctctcagaccaccatcttagatgg

SEQ ID NO: 1307 - DNA, 24 bp, Glycine max
  source 1..24: mol_type = genomic DNA
ctctcagcccaccttattttaaat

SEQ ID NO: 1308 - DNA, 24 bp, Glycine max
  source 1..24: mol_type = genomic DNA
ctctgagacctcctccttggagac

SEQ ID NO: 1309 - DNA, 24 bp, Glycine max
  source 1..24: mol_type = genomic DNA
ctctgataccactttgttggaaag

SEQ ID NO: 1310 - DNA, 24 bp, Glycine max
  source 1..24: mol_type = genomic DNA
ctctggtacacccttctttaaaag

SEQ ID NO: 1311 - DNA, 24 bp, Glycine max
  source 1..24: mol_type = genomic DNA
ctcttaatctgccttctatgttag

SEQ ID NO: 1312 - DNA, 24 bp, Glycine max
  source 1..24: mol_type = genomic DNA
ctcttacacttgctactttgaaaa

SEQ ID NO: 1313 - DNA, 24 bp, Glycine max
  source 1..24: mol_type = genomic DNA
ctcttagaacgactcattttaaag

SEQ ID NO: 1314 - DNA, 24 bp, Glycine max
  source 1..24: mol_type = genomic DNA
ctcttagaactccttttgtgaaag

SEQ ID NO: 1315 - DNA, 24 bp, Glycine max
  source 1..24: mol_type = genomic DNA
ctcttagaatgcgtactttcaaag

SEQ ID NO: 1316 - DNA, 24 bp, Glycine max
  source 1..24: mol_type = genomic DNA
ctcttagaatgtcttgcttggaag

SEQ ID NO: 1317 - DNA, 24 bp, Glycine max
  source 1..24: mol_type = genomic DNA
ctcttagaatgtgttttttgaaag

SEQ ID NO: 1318 - DNA, 24 bp, Glycine max
  source 1..24: mol_type = genomic DNA
ctcttagaccgtgtagtttaaaag

SEQ ID NO: 1319 - DNA, 24 bp, Glycine max
  source 1..24: mol_type = genomic DNA
ctcttagacggtcttgtttgaatc

SEQ ID NO: 1320 - DNA, 24 bp, Glycine max
  source 1..24: mol_type = genomic DNA
ctcttagacttatttttttgaaag

SEQ ID NO: 1321 - DNA, 24 bp, Glycine max
  source 1..24: mol_type = genomic DNA
ctcttagacttttttcttttaaaa

SEQ ID NO: 1322 - DNA, 24 bp, Glycine max
  source 1..24: mol_type = genomic DNA
ctcttagattaacttctttaaaag

SEQ ID NO: 1323 - DNA, 24 bp, Glycine max
  source 1..24: mol_type = genomic DNA
ctcttaggccactttcttagaatt

SEQ ID NO: 1324 - DNA, 24 bp, Glycine max
  source 1..24: mol_type = genomic DNA
ctcttaggccctcctctttgaaag

SEQ ID NO: 1325 - DNA, 24 bp, Glycine max
  source 1..24: mol_type = genomic DNA
ctcttagtccctatagtttgaaag

SEQ ID NO: 1326 - DNA, 24 bp, Glycine max
  source 1..24: mol_type = genomic DNA
ctcttagtcctctttctttaaatg

SEQ ID NO: 1327 - DNA, 24 bp, Glycine max
  source 1..24: mol_type = genomic DNA
ctcttataccgtcatctttgacag

SEQ ID NO: 1328 - DNA, 24 bp, Glycine max
  source 1..24: mol_type = genomic DNA
ctcttatatcagcttctttaaaaa

SEQ ID NO: 1329 - DNA, 24 bp, Glycine max
  source 1..24: mol_type = genomic DNA
ctcttatatctctttcttttaaat

SEQ ID NO: 1330 - DNA, 24 bp, Glycine max
  source 1..24: mol_type = genomic DNA
ctcttattcagcctcatttgaagg

SEQ ID NO: 1331 - DNA, 24 bp, Glycine max
  source 1..24: mol_type = genomic DNA
ctcttcgactgcctcatttgaaat

SEQ ID NO: 1332 - DNA, 24 bp, Glycine max
  source 1..24: mol_type = genomic DNA
ctcttctgacgccttctgtgaaag

SEQ ID NO: 1333 - DNA, 24 bp, Glycine max
  source 1..24: mol_type = genomic DNA
ctcttggacctccatcatcgaatc

SEQ ID NO: 1334 - DNA, 24 bp, Glycine max
  source 1..24: mol_type = genomic DNA
ctcttggagagggttctgtgaaag

SEQ ID NO: 1335 - DNA, 24 bp, Glycine max
  source 1..24: mol_type = genomic DNA
ctctttgaccaactccctggaatg

SEQ ID NO: 1336 - DNA, 24 bp, Glycine max
  source 1..24: mol_type = genomic DNA
ctctttgggcgtattctttgaaag

SEQ ID NO: 1337 - DNA, 24 bp, Glycine max
  source 1..24: mol_type = genomic DNA
ctctttgtcccccttatatgaaag

SEQ ID NO: 1338 - DNA, 24 bp, Glycine max
  source 1..24: mol_type = genomic DNA
ctcttttaccgctttgtgtcaaag

SEQ ID NO: 1339 - DNA, 24 bp, Glycine max
  source 1..24: mol_type = genomic DNA
ctgcaagtccaccttctgggaaag

SEQ ID NO: 1340 - DNA, 24 bp, Glycine max
  source 1..24: mol_type = genomic DNA
ctgcatgaccaacttcattgaaag

SEQ ID NO: 1341 - DNA, 24 bp, Glycine max
  source 1..24: mol_type = genomic DNA
ctgtgagaccgactgctttcacag

SEQ ID NO: 1342 - DNA, 24 bp, Glycine max
  source 1..24: mol_type = genomic DNA
ctgttagacatacttcattgaaac

SEQ ID NO: 1343 - DNA, 24 bp, Glycine max
  source 1..24: mol_type = genomic DNA
ctgtttgaccaaattctttcaaag

SEQ ID NO: 1344 - DNA, 24 bp, Glycine max
  source 1..24: mol_type = genomic DNA
ctttgaagccgccatcgttgaaag

SEQ ID NO: 1345 - DNA, 24 bp, Glycine max
  source 1..24: mol_type = genomic DNA
ctttgaagccgccgtcattgaaag

SEQ ID NO: 1346 - DNA, 24 bp, Glycine max
  source 1..24: mol_type = genomic DNA
cttttagaccgccatcataaataa

SEQ ID NO: 1347 - DNA, 24 bp, Glycine max
  source 1..24: mol_type = genomic DNA
cttttagactgagttttttgaaag

SEQ ID NO: 1348 - DNA, 24 bp, Glycine max
  source 1..24: mol_type = genomic DNA
cttttagtccgtatactttgaaag

SEQ ID NO: 1349 - DNA, 24 bp, Glycine max
  source 1..24: mol_type = genomic DNA
cttttagtccgtatagtttgaaag

SEQ ID NO: 1350 - DNA, 24 bp, Glycine max
  source 1..24: mol_type = genomic DNA
cttttagtccgtgtaatttgaaag

SEQ ID NO: 1351 - DNA, 24 bp, Glycine max
  source 1..24: mol_type = genomic DNA
cttttcttccgccttctttgaatg

SEQ ID NO: 1352 - DNA, 24 bp, Glycine max
  source 1..24: mol_type = genomic DNA
cttttggaaaggcttctatgaaag

SEQ ID NO: 1353 - DNA, 24 bp, Glycine max
  source 1..24: mol_type = genomic DNA
cttttggacccccttttatgaaag

SEQ ID NO: 1354 - DNA, 24 bp, Glycine max
  source 1..24: mol_type = genomic DNA
ctttttgtccgccttctgtgtcag

SEQ ID NO: 1355 - DNA, 24 bp, Glycine max
  source 1..24: mol_type = genomic DNA
gtcaaaaaccgccacttttgaaag

SEQ ID NO: 1356 - DNA, 24 bp, Glycine max
  source 1..24: mol_type = genomic DNA
gtcttaaacggccttctcttaaat

SEQ ID NO: 1357 - DNA, 24 bp, Glycine max
  source 1..24: mol_type = genomic DNA
gtcttagaacgtcttcgttgaaaa

SEQ ID NO: 1358 - DNA, 24 bp, Glycine max
  source 1..24: mol_type = genomic DNA
gtcttagaaggcctactttcaaag

SEQ ID NO: 1359 - DNA, 24 bp, Glycine max
  source 1..24: mol_type = genomic DNA
gtcttagaatgcctactttcaaag

SEQ ID NO: 1360 - DNA, 24 bp, Glycine max
  source 1..24: mol_type = genomic DNA
gtcttagaatgcctacttttaaag

SEQ ID NO: 1361 - DNA, 24 bp, Glycine max
  source 1..24: mol_type = genomic DNA
gtcttagaccgccttgtttgagcc

SEQ ID NO: 1362 - DNA, 24 bp, Glycine max
  source 1..24: mol_type = genomic DNA
gtcttagagtgcctactttcaaag

SEQ ID NO: 1363 - DNA, 24 bp, Glycine max
  source 1..24: mol_type = genomic DNA
gtcttcgacattcttctttcaaag

SEQ ID NO: 1364 - DNA, 24 bp, Glycine max
  source 1..24: mol_type = genomic DNA
gtctttgactgcctactttcaaag

SEQ ID NO: 1365 - DNA, 24 bp, Glycine max
  source 1..24: mol_type = genomic DNA
ttccatggccgccttctgtgaaag

SEQ ID NO: 1366 - DNA, 24 bp, Glycine max
  source 1..24: mol_type = genomic DNA
ttctaagaacgacttcactggaag

SEQ ID NO: 1367 - DNA, 24 bp, Glycine max
  source 1..24: mol_type = genomic DNA
ttctaagaccggcattttttaaag

SEQ ID NO: 1368 - DNA, 24 bp, Glycine max
  source 1..24: mol_type = genomic DNA
ttcttacctcgccttctttgtaag

SEQ ID NO: 1369 - DNA, 24 bp, Glycine max
  source 1..24: mol_type = genomic DNA
ttcttagaccgattattttcaaag

SEQ ID NO: 1370 - DNA, 24 bp, Glycine max
  source 1..24: mol_type = genomic DNA
ttcttcaaccgcctcatttgcaag

SEQ ID NO: 1371 - DNA, 24 bp, Glycine max
  source 1..24: mol_type = genomic DNA
ttctttgaccgcatgctctgtcag

SEQ ID NO: 1372 - DNA, 24 bp, Glycine max
  source 1..24: mol_type = genomic DNA
tttttagaccccatagtttgaaag

SEQ ID NO: 1373 - DNA, 24 bp, Glycine max
  source 1..24: mol_type = genomic DNA
tttttagagcaacttctttaaaag

SEQ ID NO: 1374 - DNA, 24 bp, Glycine max
  source 1..24: mol_type = genomic DNA
tttttggaccgccgtccttgaaag

SEQ ID NO: 1375 - DNA, 24 bp, Brassica napus
  source 1..24: mol_type = genomic DNA
aacctagaccgccttccctgaacg

SEQ ID NO: 1376 - DNA, 24 bp, Brassica napus
  source 1..24: mol_type = genomic DNA
aactgtgaccgccttctatgtaag

SEQ ID NO: 1377 - DNA, 24 bp, Brassica napus
  source 1..24: mol_type = genomic DNA
atctaaaacccccttctttgaaac

SEQ ID NO: 1378 - DNA, 24 bp, Brassica napus
  source 1..24: mol_type = genomic DNA
atcttacacggccttccttgaaac

SEQ ID NO: 1379 - DNA, 24 bp, Brassica napus
  source 1..24: mol_type = genomic DNA
atcttacacggccttctttgaaca

SEQ ID NO: 1380 - DNA, 24 bp, Brassica napus
  source 1..24: mol_type = genomic DNA
atcttagaccttctactttgagag

SEQ ID NO: 1381 - DNA, 24 bp, Brassica napus
  source 1..24: mol_type = genomic DNA
atcttagacggccttccttgaaca

SEQ ID NO: 1382 - DNA, 24 bp, Brassica napus
  source 1..24: mol_type = genomic DNA
atgttagagcggcttctttgcaag

SEQ ID NO: 1383 - DNA, 24 bp, Brassica napus
  source 1..24: mol_type = genomic DNA
cacctagaccgatttttttgaaag

SEQ ID NO: 1384 - DNA, 24 bp, Brassica napus
  source 1..24: mol_type = genomic DNA
cacctggactgccttccttggaag

SEQ ID NO: 1385 - DNA, 24 bp, Brassica napus
  source 1..24: mol_type = genomic DNA
cacgtggtcccccttctttgtaag

SEQ ID NO: 1386 - DNA, 24 bp, Brassica napus
  source 1..24: mol_type = genomic DNA
cactaagaccaccttcgttgggag

SEQ ID NO: 1387 - DNA, 24 bp, Brassica napus
  source 1..24: mol_type = genomic DNA
cactaggaccgccttcaatgaaag

SEQ ID NO: 1388 - DNA, 24 bp, Brassica napus
  source 1..24: mol_type = genomic DNA
cacttagaccacctacaatgaagg

SEQ ID NO: 1389 - DNA, 24 bp, Brassica napus
  source 1..24: mol_type = genomic DNA
cacttagaccacctccatcgacag

SEQ ID NO: 1390 - DNA, 24 bp, Brassica napus
  source 1..24: mol_type = genomic DNA
cacttagaccgcctccaatgatag

SEQ ID NO: 1391 - DNA, 24 bp, Brassica napus
  source 1..24: mol_type = genomic DNA
cacttggactgccttctcggaatg

SEQ ID NO: 1392 - DNA, 24 bp, Brassica napus
  source 1..24: mol_type = genomic DNA
ccaatagaccgcctgcttcgacag

SEQ ID NO: 1393 - DNA, 24 bp, Brassica napus
  source 1..24: mol_type = genomic DNA
cccttagaccacctccattggagg

SEQ ID NO: 1394 - DNA, 24 bp, Brassica napus
  source 1..24: mol_type = genomic DNA
cgcctagaccgtctactctgaatg

SEQ ID NO: 1395 - DNA, 24 bp, Brassica napus
  source 1..24: mol_type = genomic DNA
cgcttacaccgccgcctttgagtg

SEQ ID NO: 1396 - DNA, 24 bp, Brassica napus
  source 1..24: mol_type = genomic DNA
cgctttgaccgcagtctttggcag

SEQ ID NO: 1397 - DNA, 24 bp, Brassica napus
  source 1..24: mol_type = genomic DNA
ctcagacaccgccttcttggattg

SEQ ID NO: 1398 - DNA, 24 bp, Brassica napus
  source 1..24: mol_type = genomic DNA
ctccaagacctccttcatttaaag

SEQ ID NO: 1399 - DNA, 24 bp, Brassica napus
  source 1..24: mol_type = genomic DNA
ctcctagacagtcttattggaaag

SEQ ID NO: 1400 - DNA, 24 bp, Brassica napus
  source 1..24: mol_type = genomic DNA
ctcctcgacagccttccgagaaag

SEQ ID NO: 1401 - DNA, 24 bp, Brassica napus
  source 1..24: mol_type = genomic DNA
ctcctggaccgcgttccttggcag

SEQ ID NO: 1402 - DNA, 24 bp, Brassica napus
  source 1..24: mol_type = genomic DNA
ctcggagaccgccttcacaaaaag

SEQ ID NO: 1403 - DNA, 24 bp, Brassica napus
  source 1..24: mol_type = genomic DNA
ctcgttcatcaccttctttgaaag

SEQ ID NO: 1404 - DNA, 24 bp, Brassica napus
  source 1..24: mol_type = genomic DNA
ctctaagaccacctccatcggaag

SEQ ID NO: 1405 - DNA, 24 bp, Brassica napus
  source 1..24: mol_type = genomic DNA
ctctacaacagacttctttgaaag

SEQ ID NO: 1406 - DNA, 24 bp, Brassica napus
  source 1..24: mol_type = genomic DNA
ctctgactccgccttcgtggacag

SEQ ID NO: 1407 - DNA, 24 bp, Brassica napus
  source 1..24: mol_type = genomic DNA
ctctgagaccgcctcctgaacaag

SEQ ID NO: 1408 - DNA, 24 bp, Brassica napus
  source 1..24: mol_type = genomic DNA
ctctgagacttccttcgttgaaaa

SEQ ID NO: 1409 - DNA, 24 bp, Brassica napus
  source 1..24: mol_type = genomic DNA
ctcttagaacactctcgttgaaag

SEQ ID NO: 1410 - DNA, 24 bp, Brassica napus
  source 1..24: mol_type = genomic DNA
ctcttagacatcattcgtagaaag

SEQ ID NO: 1411 - DNA, 24 bp, Brassica napus
  source 1..24: mol_type = genomic DNA
ctcttagacattcttctttacaag

SEQ ID NO: 1412 - DNA, 24 bp, Brassica napus
  source 1..24: mol_type = genomic DNA
ctcttagaccacctactttgaccg

SEQ ID NO: 1413 - DNA, 24 bp, Brassica napus
  source 1..24: mol_type = genomic DNA
ctcttagaccacctccattgggag

SEQ ID NO: 1414 - DNA, 24 bp, Brassica napus
  source 1..24: mol_type = genomic DNA
ctcttagaccacctccattggtgg

SEQ ID NO: 1415 - DNA, 24 bp, Brassica napus
  source 1..24: mol_type = genomic DNA
ctcttagaccctctactttgaggg

SEQ ID NO: 1416 - DNA, 24 bp, Brassica napus
  source 1..24: mol_type = genomic DNA
ctcttagaccttctactttgagag

SEQ ID NO: 1417 - DNA, 24 bp, Brassica napus
  source 1..24: mol_type = genomic DNA
ctcttagaccttctactttgaggg

SEQ ID NO: 1418 - DNA, 24 bp, Brassica napus
  source 1..24: mol_type = genomic DNA
ctcttagagcacctccattggaag

SEQ ID NO: 1419 - DNA, 24 bp, Brassica napus
  source 1..24: mol_type = genomic DNA
ctcttagatccacttcttttagag

SEQ ID NO: 1420 - DNA, 24 bp, Brassica napus
  source 1..24: mol_type = genomic DNA
ctcttagatcgacatctttaaatg

SEQ ID NO: 1421 - DNA, 24 bp, Brassica napus
  source 1..24: mol_type = genomic DNA
ctcttagatcgacctctttaaatg

SEQ ID NO: 1422 - DNA, 24 bp, Brassica napus
  source 1..24: mol_type = genomic DNA
ctcttagatcgagttcttagcaag

SEQ ID NO: 1423 - DNA, 24 bp, Brassica napus
  source 1..24: mol_type = genomic DNA
ctcttagtccgccgtttttgaatg

SEQ ID NO: 1424 - DNA, 24 bp, Brassica napus
  source 1..24: mol_type = genomic DNA
ctcttataccatcttctttgatgg

SEQ ID NO: 1425 - DNA, 24 bp, Brassica napus
  source 1..24: mol_type = genomic DNA
ctcttcactcgccttctttgaaac

SEQ ID NO: 1426 - DNA, 24 bp, Brassica napus
  source 1..24: mol_type = genomic DNA
ctcttcgctcgccttcttgaaaag

SEQ ID NO: 1427 - DNA, 24 bp, Brassica napus
  source 1..24: mol_type = genomic DNA
ctcttgcaacgccttcttggcaag

SEQ ID NO: 1428 - DNA, 24 bp, Brassica napus
  source 1..24: mol_type = genomic DNA
ctcttggacggctttcttaggaag

SEQ ID NO: 1429 - DNA, 24 bp, Brassica napus
  source 1..24: mol_type = genomic DNA
ctcttggactgctttccttggaag

SEQ ID NO: 1430 - DNA, 24 bp, Brassica napus
  source 1..24: mol_type = genomic DNA
ctgttagaacgcctggtctgaaag

SEQ ID NO: 1431 - DNA, 24 bp, Brassica napus
  source 1..24: mol_type = genomic DNA
ctgttagaccgcctacttcttaag

SEQ ID NO: 1432 - DNA, 24 bp, Brassica napus
  source 1..24: mol_type = genomic DNA
ctgtttggccgccttctctgaagg

SEQ ID NO: 1433 - DNA, 24 bp, Brassica napus
  source 1..24: mol_type = genomic DNA
ctttcagagcgccttctttggatg

SEQ ID NO: 1434 - DNA, 24 bp, Brassica napus
  source 1..24: mol_type = genomic DNA
cttttacacccgcttctttgatag

SEQ ID NO: 1435 - DNA, 24 bp, Brassica napus
  source 1..24: mol_type = genomic DNA
gtcttggaccgccttcatagaatg

SEQ ID NO: 1436 - DNA, 24 bp, Brassica napus
  source 1..24: mol_type = genomic DNA
gtcttggaccgccttcatggaatg

SEQ ID NO: 1437 - DNA, 24 bp, Brassica napus
  source 1..24: mol_type = genomic DNA
gttttagacctccttctttcaaac

SEQ ID NO: 1438 - DNA, 24 bp, Brassica napus
  source 1..24: mol_type = genomic DNA
tatttagaccgccttctttgaata

SEQ ID NO: 1439 - DNA, 24 bp, Brassica napus
  source 1..24: mol_type = genomic DNA
ttcttagagcactttcattgaaag

SEQ ID NO: 1440 - DNA, 17 bp, Brassica napus
  source 1..17: mol_type = genomic DNA
atgatctacaagataaa

SEQ ID NO: 1441 - DNA, 17 bp, Brassica napus
  source 1..17: mol_type = genomic DNA
atgatctactagataag

SEQ ID NO: 1442 - DNA, 17 bp, Brassica napus
  source 1..17: mol_type = genomic DNA
atgatctactagatcaa

SEQ ID NO: 1443 - DNA, 17 bp, Brassica napus
  source 1..17: mol_type = genomic DNA
atgatctactggataaa

SEQ ID NO: 1444 - DNA, 17 bp, Brassica napus
  source 1..17: mol_type = genomic DNA
ctgagctactagataaa

SEQ ID NO: 1445 - DNA, 17 bp, Brassica napus
  source 1..17: mol_type = genomic DNA
ctgatctactagaaaaa

SEQ ID NO: 1446 - DNA, 17 bp, Brassica napus
  source 1..17: mol_type = genomic DNA
ctgatctactagagaaa

SEQ ID NO: 1447 - DNA, 17 bp, Brassica napus
  source 1..17: mol_type = genomic DNA
ctgatctactagatcaa

SEQ ID NO: 1448 - DNA, 17 bp, Brassica napus
  source 1..17: mol_type = genomic DNA
gagatctacaagataaa

SEQ ID NO: 1449 - DNA, 17 bp, Brassica napus
  source 1..17: mol_type = genomic DNA
gagatctactagattaa

SEQ ID NO: 1450 - DNA, 17 bp, Brassica napus
  source 1..17: mol_type = genomic DNA
gagatttactagataaa

SEQ ID NO: 1451 - DNA, 17 bp, Brassica napus
  source 1..17: mol_type = genomic DNA
gcgatctagtagataaa

SEQ ID NO: 1452 - DNA, 17 bp, Brassica napus
  source 1..17: mol_type = genomic DNA
gggatatactagataaa

SEQ ID NO: 1453 - DNA, 17 bp, Brassica napus
  source 1..17: mol_type = genomic DNA
gggatctacaagataaa

SEQ ID NO: 1454 - DNA, 17 bp, Brassica napus
  source 1..17: mol_type = genomic DNA
gggatctactatataaa

SEQ ID NO: 1455 - DNA, 17 bp, Brassica napus
  source 1..17: mol_type = genomic DNA
gggatttactagataaa

SEQ ID NO: 1456 - DNA, 17 bp, Brassica napus
  source 1..17: mol_type = genomic DNA
gtaatctactggataaa

SEQ ID NO: 1457 - DNA, 17 bp, Brassica napus
  source 1..17: mol_type = genomic DNA
gtaatctcctagataaa

SEQ ID NO: 1458 - DNA, 17 bp, Brassica napus
  source 1..17: mol_type = genomic DNA
gtaatcttctagataaa

SEQ ID NO: 1459 - DNA, 17 bp, Brassica napus
  source 1..17: mol_type = genomic DNA
gtcatctactagacaaa

SEQ ID NO: 1460 - DNA, 17 bp, Brassica napus
  source 1..17: mol_type = genomic DNA
gtgaactacaagataaa

SEQ ID NO: 1461 - DNA, 17 bp, Brassica napus
  source 1..17: mol_type = genomic DNA
gtgaactactagataaa

SEQ ID NO: 1462 - DNA, 17 bp, Brassica napus
  source 1..17: mol_type = genomic DNA
gtgaactactagctaaa

SEQ ID NO: 1463 - DNA, 17 bp, Brassica napus
  source 1..17: mol_type = genomic DNA
gtgaactactatataaa

SEQ ID NO: 1464 - DNA, 17 bp, Brassica napus
  source 1..17: mol_type = genomic DNA
gtgatatactagacaaa

SEQ ID NO: 1465 - DNA, 17 bp, Brassica napus
  source 1..17: mol_type = genomic DNA
gtgatatactagataac

SEQ ID NO: 1466 - DNA, 17 bp, Brassica napus
  source 1..17: mol_type = genomic DNA
gtgatcaactagatgaa

SEQ ID NO: 1467 - DNA, 17 bp, Brassica napus
  source 1..17: mol_type = genomic DNA
gtgatcaactggataaa

SEQ ID NO: 1468 - DNA, 17 bp, Brassica napus
  source 1..17: mol_type = genomic DNA
gtgatctaatagttaaa

SEQ ID NO: 1469 - DNA, 17 bp, Brassica napus
  source 1..17: mol_type = genomic DNA
gtgatctaatcgataaa

SEQ ID NO: 1470 - DNA, 17 bp, Brassica napus
  source 1..17: mol_type = genomic DNA
gtgatctaatggataaa

SEQ ID NO: 1471 - DNA, 17 bp, Brassica napus
  source 1..17: mol_type = genomic DNA
gtgatctacaagaaaaa

SEQ ID NO: 1472 - DNA, 17 bp, Brassica napus
  source 1..17: mol_type = genomic DNA
gtgatctacaagataat

SEQ ID NO: 1473 - DNA, 17 bp, Brassica napus
  source 1..17: mol_type = genomic DNA
gtgatctacaagatata

SEQ ID NO: 1474 - DNA, 17 bp, Brassica napus
  source 1..17: mol_type = genomic DNA
gtgatctacaaggtaaa

SEQ ID NO: 1475 - DNA, 17 bp, Brassica napus
  source 1..17: mol_type = genomic DNA
gtgatctacaagttaaa

SEQ ID NO: 1476 - DNA, 17 bp, Brassica napus
  source 1..17: mol_type = genomic DNA
gtgatctacaatataaa

SEQ ID NO: 1477 - DNA, 17 bp, Brassica napus
  source 1..17: mol_type = genomic DNA
gtgatctactaaaaaaa

SEQ ID NO: 1478 - DNA, 17 bp, Brassica napus
  source 1..17: mol_type = genomic DNA
gtgatctactaaacaaa

SEQ ID NO: 1479 - DNA, 17 bp, Brassica napus
  source 1..17: mol_type = genomic DNA
gtgatctactacaaaaa

SEQ ID NO: 1480 - DNA, 17 bp, Brassica napus
  source 1..17: mol_type = genomic DNA
gtgatctactacatcaa

SEQ ID NO: 1481 - DNA, 17 bp, Brassica napus
  source 1..17: mol_type = genomic DNA
gtgatctactagaacaa

SEQ ID NO: 1482 - DNA, 17 bp, Brassica napus
  source 1..17: mol_type = genomic DNA
gtgatctactagagaaa

SEQ ID NO: 1483 - DNA, 17 bp, Brassica napus
  source 1..17: mol_type = genomic DNA
gtgatctactagatacg

SEQ ID NO: 1484 - DNA, 17 bp, Brassica napus
  source 1..17: mol_type = genomic DNA
gtgatctactagatact

SEQ ID NO: 1485 - DNA, 17 bp, Brassica napus
  source 1..17: mol_type = genomic DNA
gtgatctactaggtaga

SEQ ID NO: 1486 - DNA, 17 bp, Brassica napus
  source 1..17: mol_type = genomic DNA
gtgatctactatataac

SEQ ID NO: 1487 - DNA, 17 bp, Brassica napus
  source 1..17: mol_type = genomic DNA
gtgatctactggatgaa

SEQ ID NO: 1488 - DNA, 17 bp, Brassica napus
  source 1..17: mol_type = genomic DNA
gtgatctacttgagaaa

SEQ ID NO: 1489 - DNA, 17 bp, Brassica napus
  source 1..17: mol_type = genomic DNA
gtgatctacttgataaa

SEQ ID NO: 1490 - DNA, 17 bp, Brassica napus
  source 1..17: mol_type = genomic DNA
gtgatctagtggataaa

SEQ ID NO: 1491 - DNA, 17 bp, Brassica napus
  source 1..17: mol_type = genomic DNA
gtgatctccgagataaa

SEQ ID NO: 1492 - DNA, 17 bp, Brassica napus
  source 1..17: mol_type = genomic DNA
gtgatctcctagataca

SEQ ID NO: 1493 - DNA, 17 bp, Brassica napus
  source 1..17: mol_type = genomic DNA
gtgatcttccagataaa

SEQ ID NO: 1494 - DNA, 17 bp, Brassica napus
  source 1..17: mol_type = genomic DNA
gtgatcttcgagataaa

SEQ ID NO: 1495 - DNA, 17 bp, Brassica napus
  source 1..17: mol_type = genomic DNA
gtgatcttctaaataaa

SEQ ID NO: 1496 - DNA, 17 bp, Brassica napus
  source 1..17: mol_type = genomic DNA
gtgatcttctagagaaa

SEQ ID NO: 1497 - DNA, 17 bp, Brassica napus
  source 1..17: mol_type = genomic DNA
gtgatcttctagatcaa

SEQ ID NO: 1498 - DNA, 17 bp, Brassica napus
  source 1..17: mol_type = genomic DNA
gtgatcttctggataaa

SEQ ID NO: 1499 - DNA, 17 bp, Brassica napus
  source 1..17: mol_type = genomic DNA
gtgattaactagataaa

SEQ ID NO: 1500 - DNA, 17 bp, Brassica napus
  source 1..17: mol_type = genomic DNA
gtgctctacttgataaa

SEQ ID NO: 1501 - DNA, 17 bp, Brassica napus
  source 1..17: mol_type = genomic DNA
gtggtctactagctaaa

SEQ ID NO: 1502 - DNA, 17 bp, Brassica napus
  source 1..17: mol_type = genomic DNA
gtggtcttctagataaa

SEQ ID NO: 1503 - DNA, 17 bp, Brassica napus
  source 1..17: mol_type = genomic DNA
gtgtcctactagataaa

SEQ ID NO: 1504 - DNA, 17 bp, Brassica napus
  source 1..17: mol_type = genomic DNA
gtgttctaatagataaa

SEQ ID NO: 1505 - DNA, 17 bp, Brassica napus
  source 1..17: mol_type = genomic DNA
gtgttctactagatgaa

SEQ ID NO: 1506 - DNA, 17 bp, Brassica napus
  source 1..17: mol_type = genomic DNA
gtgttctactagattaa

SEQ ID NO: 1507 - DNA, 17 bp, Brassica napus
  source 1..17: mol_type = genomic DNA
gttatctacaagataaa

SEQ ID NO: 1508 - DNA, 17 bp, Brassica napus
  source 1..17: mol_type = genomic DNA
gttatctactagatgaa

SEQ ID NO: 1509 - DNA, 17 bp, Brassica napus
  source 1..17: mol_type = genomic DNA
gttatctactcgataaa

SEQ ID NO: 1510 - DNA, 17 bp, Brassica napus
  source 1..17: mol_type = genomic DNA
ttgatcaactagataaa

SEQ ID NO: 1511 - DNA, 17 bp, Brassica napus
  source 1..17: mol_type = genomic DNA
ttgatctacaagataaa

SEQ ID NO: 1512 - DNA, 17 bp, Brassica napus
  source 1..17: mol_type = genomic DNA
ttgatctacgagataaa

SEQ ID NO: 1513 - DNA, 17 bp, Brassica napus
  source 1..17: mol_type = genomic DNA
ttgatctactagatgaa

SEQ ID NO: 1514 - DNA, 17 bp, Oryza sativa
  source 1..17: mol_type = genomic DNA
aagatctactagataaa

SEQ ID NO: 1515 - DNA, 17 bp, Oryza sativa
  source 1..17: mol_type = genomic DNA
atgatctactagataac

SEQ ID NO: 1516 - DNA, 17 bp, Oryza sativa
  source 1..17: mol_type = genomic DNA
atgatctactaggtaaa

SEQ ID NO: 1517 - DNA, 17 bp, Oryza sativa
  source 1..17: mol_type = genomic DNA
ctgatctactggataaa

SEQ ID NO: 1518 - DNA, 17 bp, Oryza sativa
  source 1..17: mol_type = genomic DNA
ctgatctacttgataaa

SEQ ID NO: 1519 - DNA, 17 bp, Oryza sativa
  source 1..17: mol_type = genomic DNA
gagatctactagaaaaa

SEQ ID NO: 1520 - DNA, 17 bp, Oryza sativa
  source 1..17: mol_type = genomic DNA
gagatttactagataaa

SEQ ID NO: 1521 - DNA, 17 bp, Oryza sativa
  source 1..17: mol_type = genomic DNA
gggatctactagaaaaa

SEQ ID NO: 1522 - DNA, 17 bp, Oryza sativa
  source 1..17: mol_type = genomic DNA
gtaatctactagaaaaa

SEQ ID NO: 1523 - DNA, 17 bp, Oryza sativa
  source 1..17: mol_type = genomic DNA
gtaatctactagataca

SEQ ID NO: 1524 - DNA, 17 bp, Oryza sativa
  source 1..17: mol_type = genomic DNA
gtaatctactagttaaa

SEQ ID NO: 1525 - DNA, 17 bp, Oryza sativa
  source 1..17: mol_type = genomic DNA
gtactctactagataaa

SEQ ID NO: 1526 - DNA, 17 bp, Oryza sativa
  source 1..17: mol_type = genomic DNA
gtcatctactagatcaa

SEQ ID NO: 1527 - DNA, 17 bp, Oryza sativa
  source 1..17: mol_type = genomic DNA
gtgaactactaaataaa

SEQ ID NO: 1528 - DNA, 17 bp, Oryza sativa
  source 1..17: mol_type = genomic DNA
gtgagttactagataaa

SEQ ID NO: 1529 - DNA, 17 bp, Oryza sativa
  source 1..17: mol_type = genomic DNA
gtgatatagtagataaa

SEQ ID NO: 1530 - DNA, 17 bp, Oryza sativa
  source 1..17: mol_type = genomic DNA
gtgatcaacgagataaa

SEQ ID NO: 1531 - DNA, 17 bp, Oryza sativa
  source 1..17: mol_type = genomic DNA
gtgatcaactggataaa

SEQ ID NO: 1532 - DNA, 17 bp, Oryza sativa
  source 1..17: mol_type = genomic DNA
gtgatccactagttaaa

SEQ ID NO: 1533 - DNA, 17 bp, Oryza sativa
  source 1..17: mol_type = genomic DNA
gtgatcgactagattaa

SEQ ID NO: 1534 - DNA, 17 bp, Oryza sativa
  source 1..17: mol_type = genomic DNA
gtgatctaatagatcaa

SEQ ID NO: 1535 - DNA, 17 bp, Oryza sativa
  source 1..17: mol_type = genomic DNA
gtgatctaatagttaaa

SEQ ID NO: 1536 - DNA, 17 bp, Oryza sativa
  source 1..17: mol_type = genomic DNA
gtgatctacaaaataaa

SEQ ID NO: 1537 - DNA, 17 bp, Oryza sativa
  source 1..17: mol_type = genomic DNA
gtgatctacaatataaa

SEQ ID NO: 1538 - DNA, 17 bp, Oryza sativa
  source 1..17: mol_type = genomic DNA
gtgatctactagacaaa

SEQ ID NO: 1539 - DNA, 17 bp, Oryza sativa
  source 1..17: mol_type = genomic DNA
gtgatctactagcttaa

SEQ ID NO: 1540 - DNA, 17 bp, Oryza sativa
  source 1..17: mol_type = genomic DNA
gtgatctactatagaaa

SEQ ID NO: 1541 - DNA, 17 bp, Oryza sativa
  source 1..17: mol_type = genomic DNA
gtgatctactggacaaa

SEQ ID NO: 1542 - DNA, 17 bp, Oryza sativa
  source 1..17: mol_type = genomic DNA
gtgatctacttgataat

SEQ ID NO: 1543 - DNA, 17 bp, Oryza sativa
  source 1..17: mol_type = genomic DNA
gtgatctacttgctaaa

SEQ ID NO: 1544 - DNA, 17 bp, Oryza sativa
  source 1..17: mol_type = genomic DNA
gtgatctattagattaa

SEQ ID NO: 1545 - DNA, 17 bp, Oryza sativa
  source 1..17: mol_type = genomic DNA
gtgatctattagctaaa

SEQ ID NO: 1546 - DNA, 17 bp, Oryza sativa
  source 1..17: mol_type = genomic DNA
gtgatctattagttaaa

SEQ ID NO: 1547 - DNA, 17 bp, Oryza sativa
  source 1..17: mol_type = genomic DNA
gtgatctatttgataaa

SEQ ID NO: 1548 - DNA, 17 bp, Oryza sativa
  source 1..17: mol_type = genomic DNA
gtgatctcctagataga

SEQ ID NO: 1549 - DNA, 17 bp, Oryza sativa
  source 1..17: mol_type = genomic DNA
gtgatgtactagataat

SEQ ID NO: 1550 - DNA, 17 bp, Oryza sativa
  source 1..17: mol_type = genomic DNA
gtgctctactagatcaa

SEQ ID NO: 1551 - DNA, 17 bp, Oryza sativa
  source 1..17: mol_type = genomic DNA
gtgttctacgagataaa

SEQ ID NO: 1552 - DNA, 17 bp, Oryza sativa
  source 1..17: mol_type = genomic DNA
gtgttctactagatgaa

SEQ ID NO: 1553 - DNA, 17 bp, Oryza sativa
  source 1..17: mol_type = genomic DNA
gtgttctactagttaaa

SEQ ID NO: 1554 - DNA, 17 bp, Oryza sativa
  source 1..17: mol_type = genomic DNA
gttatctactagacaaa

SEQ ID NO: 1555 - DNA, 17 bp, Oryza sativa
  source 1..17: mol_type = genomic DNA
gttatctactagatgaa

SEQ ID NO: 1556 - DNA, 17 bp, Oryza sativa
  source 1..17: mol_type = genomic DNA
gttttctactagataaa

SEQ ID NO: 1557 - DNA, 17 bp, Oryza sativa
  source 1..17: mol_type = genomic DNA
ttgatctactagaaaaa

SEQ ID NO: 1558 - DNA, 17 bp, Oryza sativa
  source 1..17: mol_type = genomic DNA
ttgatctactagataca

SEQ ID NO: 1559 - DNA, 17 bp, Oryza sativa
  source 1..17: mol_type = genomic DNA
ttgatctactagatgaa

SEQ ID NO: 1560 - DNA, 17 bp, Oryza sativa
  source 1..17: mol_type = genomic DNA
ttgatctactaggtaaa

SEQ ID NO: 1561 - DNA, 17 bp, Oryza sativa
  source 1..17: mol_type = genomic DNA
ttgatctacttgataaa

SEQ ID NO: 1562 - DNA, 17 bp, Oryza sativa
  source 1..17: mol_type = genomic DNA
ttgatcttctagataaa

SEQ ID NO: 1563 - DNA, 17 bp, Zea mays
  source 1..17: mol_type = genomic DNA
ctgatctactagataaa

SEQ ID NO: 1564 - DNA, 17 bp, Zea mays
  source 1..17: mol_type = genomic DNA
gagatcaactagataaa

SEQ ID NO: 1565 - DNA, 17 bp, Zea mays
  source 1..17: mol_type = genomic DNA
gagatctactagatcaa

SEQ ID NO: 1566 - DNA, 17 bp, Zea mays
  source 1..17: mol_type = genomic DNA
gagatctactagttaaa

SEQ ID NO: 1567 - DNA, 17 bp, Zea mays
  source 1..17: mol_type = genomic DNA
gcgatctactagaaaaa

SEQ ID NO: 1568 - DNA, 17 bp, Zea mays
  source 1..17: mol_type = genomic DNA
gggatctaccagataaa

SEQ ID NO: 1569 - DNA, 17 bp, Zea mays
  source 1..17: mol_type = genomic DNA
gggatctactagaaaaa

SEQ ID NO: 1570 - DNA, 17 bp, Zea mays
  source 1..17: mol_type = genomic DNA
gtaatctactagataaa

SEQ ID NO: 1571 - DNA, 17 bp, Zea mays
  source 1..17: mol_type = genomic DNA
gtgaacaactagataaa

SEQ ID NO: 1572 - DNA, 17 bp, Zea mays
  source 1..17: mol_type = genomic DNA
gtgaactaccagataaa

SEQ ID NO: 1573 - DNA, 17 bp, Zea mays
  source 1..17: mol_type = genomic DNA
gtgaactactagacaaa

SEQ ID NO: 1574 - DNA, 17 bp, Zea mays
  source 1..17: mol_type = genomic DNA
gtgaactactagataaa

SEQ ID NO: 1575 - DNA, 17 bp, Zea mays
  source 1..17: mol_type = genomic DNA
gtgagctactagatgaa

SEQ ID NO: 1576 - DNA, 17 bp, Zea mays
  source 1..17: mol_type = genomic DNA
gtgatcaacaagataaa

SEQ ID NO: 1577 - DNA, 17 bp, Zea mays
  source 1..17: mol_type = genomic DNA
gtgatcaactagacaaa

SEQ ID NO: 1578 - DNA, 17 bp, Zea mays
  source 1..17: mol_type = genomic DNA
gtgatcaactagctaaa

SEQ ID NO: 1579 - DNA, 17 bp, Zea mays
  source 1..17: mol_type = genomic DNA
gtgatccacgagataaa

SEQ ID NO: 1580 - DNA, 17 bp, Zea mays
  source 1..17: mol_type = genomic DNA
gtgatccactagaaaaa

SEQ ID NO: 1581 - DNA, 17 bp, Zea mays
  source 1..17: mol_type = genomic DNA
gtgatccactaggtaaa

SEQ ID NO: 1582 - DNA, 17 bp, Zea mays
  source 1..17: mol_type = genomic DNA
gtgatccactggataaa

SEQ ID NO: 1583 - DNA, 17 bp, Zea mays
  source 1..17: mol_type = genomic DNA
gtgatcgactagatgaa

SEQ ID NO: 1584 - DNA, 17 bp, Zea mays
  source 1..17: mol_type = genomic DNA
gtgatctacaagagaaa

SEQ ID NO: 1585 - DNA, 17 bp, Zea mays
  source 1..17: mol_type = genomic DNA
gtgatctacaagataaa

SEQ ID NO: 1586 - DNA, 17 bp, Zea mays
  source 1..17: mol_type = genomic DNA
gtgatctacaagataga

SEQ ID NO: 1587 - DNA, 17 bp, Zea mays
  source 1..17: mol_type = genomic DNA
gtgatctacgagaaaaa

SEQ ID NO: 1588 - DNA, 17 bp, Zea mays
  source 1..17: mol_type = genomic DNA
gtgatctacgagacaaa

SEQ ID NO: 1589 - DNA, 17 bp, Zea mays
  source 1..17: mol_type = genomic DNA
gtgatctacgagataaa

SEQ ID NO: 1590 - DNA, 17 bp, Zea mays
  source 1..17: mol_type = genomic DNA
gtgatctacgagatgaa

SEQ ID NO: 1591 - DNA, 17 bp, Zea mays
  source 1..17: mol_type = genomic DNA
gtgatctactagaaaga

SEQ ID NO: 1592 - DNA, 17 bp, Zea mays
  source 1..17: mol_type = genomic DNA
gtgatctactagagaac

SEQ ID NO: 1593 - DNA, 17 bp, Zea mays
  source 1..17: mol_type = genomic DNA
gtgatctacttgataaa

SEQ ID NO: 1594 - DNA, 17 bp, Zea mays
  source 1..17: mol_type = genomic DNA
gtgatgtactagataaa

SEQ ID NO: 1595 - DNA, 17 bp, Zea mays
  source 1..17: mol_type = genomic DNA
gtggtctacaagataaa

SEQ ID NO: 1596 - DNA, 17 bp, Zea mays
  source 1..17: mol_type = genomic DNA
gtggtctacgagataaa

SEQ ID NO: 1597 - DNA, 17 bp, Zea mays
  source 1..17: mol_type = genomic DNA
gtggtctactagataaa

SEQ ID NO: 1598 - DNA, 17 bp, Zea mays
  source 1..17: mol_type = genomic DNA
gtggtctactagatgaa

SEQ ID NO: 1599 - DNA, 17 bp, Glycine max
  source 1..17: mol_type = genomic DNA
atgatctactagaaaaa

SEQ ID NO: 1600 - DNA, 17 bp, Glycine max
  source 1..17: mol_type = genomic DNA
atgatctactagataaa

SEQ ID NO: 1601 - DNA, 17 bp, Glycine max
  source 1..17: mol_type = genomic DNA
gagatctactagagaaa

SEQ ID NO: 1602 - DNA, 17 bp, Glycine max
  source 1..17: mol_type = genomic DNA
gagatctactagattaa

SEQ ID NO: 1603 - DNA, 17 bp, Glycine max
  source 1..17: mol_type = genomic DNA
gagatctactagttaaa

SEQ ID NO: 1604 - DNA, 17 bp, Glycine max
  source 1..17: mol_type = genomic DNA
gggatcaactagataaa

SEQ ID NO: 1605 - DNA, 17 bp, Glycine max
  source 1..17: mol_type = genomic DNA
gggatctactagataac

SEQ ID NO: 1606 - DNA, 17 bp, Glycine max
  source 1..17: mol_type = genomic DNA
gggatctactagctaaa

SEQ ID NO: 1607 - DNA, 17 bp, Glycine max
  source 1..17: mol_type = genomic DNA
gtgaactactagaaaaa

SEQ ID NO: 1608 - DNA, 17 bp, Glycine max
  source 1..17: mol_type = genomic DNA
gtgaactactagattaa

SEQ ID NO: 1609 - DNA, 17 bp, Glycine max
  source 1..17: mol_type = genomic DNA
gtgacctaccagataaa

SEQ ID NO: 1610 - DNA, 17 bp, Glycine max
  source 1..17: mol_type = genomic DNA
gtgacctactagattaa

SEQ ID NO: 1611 - DNA, 17 bp, Glycine max
  source 1..17: mol_type = genomic DNA
gtgaccttctagataaa

SEQ ID NO: 1612 - DNA, 17 bp, Glycine max
  source 1..17: mol_type = genomic DNA
gtgagctacgagataaa

SEQ ID NO: 1613 - DNA, 17 bp, Glycine max
  source 1..17: mol_type = genomic DNA
gtgataaactagataaa

SEQ ID NO: 1614 - DNA, 17 bp, Glycine max
  source 1..17: mol_type = genomic DNA
gtgatcaactagaaaaa

SEQ ID NO: 1615 - DNA, 17 bp, Glycine max
  source 1..17: mol_type = genomic DNA
gtgatcaactagacaaa

SEQ ID NO: 1616 - DNA, 17 bp, Glycine max
  source 1..17: mol_type = genomic DNA
gtgatcaactagataaa

SEQ ID NO: 1617 - DNA, 17 bp, Glycine max
  source 1..17: mol_type = genomic DNA
gtgatcaacttgataaa

SEQ ID NO: 1618 - DNA, 17 bp, Glycine max
  source 1..17: mol_type = genomic DNA
gtgatccacaagataaa

SEQ ID NO: 1619 - DNA, 17 bp, Glycine max
  source 1..17: mol_type = genomic DNA
gtgatcgactagaaaaa

SEQ ID NO: 1620 - DNA, 17 bp, Glycine max
  source 1..17: mol_type = genomic DNA
gtgatcgactagagaaa

SEQ ID NO: 1621 - DNA, 17 bp, Glycine max
  source 1..17: mol_type = genomic DNA
gtgatcgactaggtaaa

SEQ ID NO: 1622 - DNA, 17 bp, Glycine max
  source 1..17: mol_type = genomic DNA
gtgatctacaagaaaaa

SEQ ID NO: 1623 - DNA, 17 bp, Glycine max
  source 1..17: mol_type = genomic DNA
gtgatctacaagacaaa

SEQ ID NO: 1624 - DNA, 17 bp, Glycine max
  source 1..17: mol_type = genomic DNA
gtgatctacaagataaa

SEQ ID NO: 1625 - DNA, 17 bp, Glycine max
  source 1..17: mol_type = genomic DNA
gtgatctacaagataat

SEQ ID NO: 1626 - DNA, 17 bp, Glycine max
  source 1..17: mol_type = genomic DNA
gtgatctacaaggtaaa

SEQ ID NO: 1627 - DNA, 17 bp, Glycine max
  source 1..17: mol_type = genomic DNA
gtgatctacatgataaa

SEQ ID NO: 1628 - DNA, 17 bp, Glycine max
  source 1..17: mol_type = genomic DNA
gtgatctaccagaaaaa

SEQ ID NO: 1629 - DNA, 17 bp, Glycine max
  source 1..17: mol_type = genomic DNA
gtgatctactagaagaa

SEQ ID NO: 1630 - DNA, 17 bp, Glycine max
  source 1..17: mol_type = genomic DNA
gtgatctactagataaa

SEQ ID NO: 1631 - DNA, 17 bp, Glycine max
  source 1..17: mol_type = genomic DNA
gtgatctactaggaaaa

SEQ ID NO: 1632 - DNA, 17 bp, Glycine max
  source 1..17: mol_type = genomic DNA
gtgatctactagggaaa

SEQ ID NO: 1633 - DNA, 17 bp, Glycine max
  source 1..17: mol_type = genomic DNA
gtgatctactagttaaa

SEQ ID NO: 1634 - DNA, 17 bp, Glycine max
  source 1..17: mol_type = genomic DNA
gtgatctactagttcaa

SEQ ID NO: 1635 - DNA, 17 bp, Glycine max
  source 1..17: mol_type = genomic DNA
gtgatctacttgataca

SEQ ID NO: 1636 - DNA, 17 bp, Glycine max
  source 1..17: mol_type = genomic DNA
gtgatctcctagagaaa

SEQ ID NO: 1637 - DNA, 17 bp, Glycine max
  source 1..17: mol_type = genomic DNA
gtgatctcctagataat

SEQ ID NO: 1638 - DNA, 17 bp, Glycine max
  source 1..17: mol_type = genomic DNA
gtgatgtactagataaa

SEQ ID NO: 1639 - DNA, 17 bp, Glycine max
  source 1..17: mol_type = genomic DNA
gtgctctactagaaaaa

SEQ ID NO: 1640 - DNA, 17 bp, Glycine max
  source 1..17: mol_type = genomic DNA
gtgctctacttgataaa

SEQ ID NO: 1641 - DNA, 17 bp, Glycine max
  source 1..17: mol_type = genomic DNA
gtggtctactagaaaaa

SEQ ID NO: 1642 - DNA, 17 bp, Glycine max
  source 1..17: mol_type = genomic DNA
gtggtctactagagaaa

SEQ ID NO: 1643 - DNA, 17 bp, Glycine max
  source 1..17: mol_type = genomic DNA
gtgttctactagacaaa

SEQ ID NO: 1644 - DNA, 22 bp, Brassica napus
  source 1..22: mol_type = genomic DNA
tgatgcatcatcgcttatgcca

SEQ ID NO: 1645 - DNA, 22 bp, Brassica napus
  source 1..22: mol_type = genomic DNA
tggttcgtcatcgccatcgcca

SEQ ID NO: 1646 - DNA, 22 bp, Brassica napus
  source 1..22: mol_type = genomic DNA
tgattcggcttcgcttgcgcct

SEQ ID NO: 1647 - DNA, 22 bp, Brassica napus
  source 1..22: mol_type = genomic DNA
agattcgtcatcgccgactcca

SEQ ID NO: 1648 - DNA, 22 bp, Brassica napus
  source 1..22: mol_type = genomic DNA
tgattcgtcaactctcacgccg

SEQ ID NO: 1649 - DNA, 22 bp, Brassica napus
  source 1..22: mol_type = genomic DNA
tggatcgtcatcgtctacgcca

SEQ ID NO: 1650 - DNA, 22 bp, Brassica napus
  source 1..22: mol_type = genomic DNA
tgagtcgtcatcgctatctcca

SEQ ID NO: 1651 - DNA, 22 bp, Brassica napus
  source 1..22: mol_type = genomic DNA
agattcatcatcgctaacgaca

SEQ ID NO: 1652 - DNA, 22 bp, Brassica napus
  source 1..22: mol_type = genomic DNA
tgattcttcttcgcctacgcct

SEQ ID NO: 1653 - DNA, 22 bp, Brassica napus
  source 1..22: mol_type = genomic DNA
agattcgtcgtcggttacacca

SEQ ID NO: 1654 - DNA, 22 bp, Brassica napus
  source 1..22: mol_type = genomic DNA
agattcatcaacgtttacgcca

SEQ ID NO: 1655 - DNA, 22 bp, Brassica napus
  source 1..22: mol_type = genomic DNA
tgtttcgtcatagcctaggcca

SEQ ID NO: 1656 - DNA, 22 bp, Brassica napus
  source 1..22: mol_type = genomic DNA
tgattcctgagcgcttacgcct

SEQ ID NO: 1657 - DNA, 22 bp, Brassica napus
  source 1..22: mol_type = genomic DNA
ccattcgtaatcgcttccgcca

SEQ ID NO: 1658 - DNA, 22 bp, Brassica napus
  source 1..22: mol_type = genomic DNA
gctttcgtcattgcttacgcca

SEQ ID NO: 1659 - DNA, 22 bp, Brassica napus
  source 1..22: mol_type = genomic DNA
tgattcgtgatcgcttctgcct

SEQ ID NO: 1660 - DNA, 22 bp, Brassica napus
  source 1..22: mol_type = genomic DNA
tgagtcgtcttttcttacgcca

SEQ ID NO: 1661 - DNA, 22 bp, Brassica napus
  source 1..22: mol_type = genomic DNA
tgcttcttcatcgcttctgcca

SEQ ID NO: 1662 - DNA, 22 bp, Brassica napus
  source 1..22: mol_type = genomic DNA
taatacatcatcgcttacgcaa

SEQ ID NO: 1663 - DNA, 22 bp, Brassica napus
  source 1..22: mol_type = genomic DNA
tgattcttctttgcttacgcct

SEQ ID NO: 1664 - DNA, 22 bp, Brassica napus
  source 1..22: mol_type = genomic DNA
tgtttcttcatctctttcgcca

SEQ ID NO: 1665 - DNA, 22 bp, Brassica napus
  source 1..22: mol_type = genomic DNA
tgattagtaatagctttcgcca

SEQ ID NO: 1666 - DNA, 22 bp, Brassica napus
  source 1..22: mol_type = genomic DNA
tcattggtcatctcttccgcca

SEQ ID NO: 1667 - DNA, 22 bp, Brassica napus
  source 1..22: mol_type = genomic DNA
tgatttctcatcgcatactcca

SEQ ID NO: 1668 - DNA, 22 bp, Brassica napus
  source 1..22: mol_type = genomic DNA
tgattcgtcatctcttacttct

SEQ ID NO: 1669 - DNA, 22 bp, Brassica napus
  source 1..22: mol_type = genomic DNA
tgatttgtcatagcttaagaca

SEQ ID NO: 1670 - DNA, 22 bp, Brassica napus
  source 1..22: mol_type = genomic DNA
tgattcgtgatggcttactaca

SEQ ID NO: 1671 - DNA, 22 bp, Brassica napus
  source 1..22: mol_type = genomic DNA
tgatacgactacgctgacgcca

SEQ ID NO: 1672 - DNA, 22 bp, Brassica napus
  source 1..22: mol_type = genomic DNA
ggagtcgtcaacgctgccgcca

SEQ ID NO: 1673 - DNA, 22 bp, Brassica napus
  source 1..22: mol_type = genomic DNA
tgcaacgtcatcgcttccgcct

SEQ ID NO: 1674 - DNA, 22 bp, Brassica napus
  source 1..22: mol_type = genomic DNA
tgcttcgtcgtcgcctccgccg

SEQ ID NO: 1675 - DNA, 22 bp, Brassica napus
  source 1..22: mol_type = genomic DNA
ggcttcgtcatcgccttcgccg

SEQ ID NO: 1676 - DNA, 22 bp, Brassica napus
  source 1..22: mol_type = genomic DNA
cgacccgtcatcgctgccgcca

SEQ ID NO: 1677 - DNA, 22 bp, Brassica napus
  source 1..22: mol_type = genomic DNA
tgagtcggcttcgcttccgcct

SEQ ID NO: 1678 - DNA, 22 bp, Brassica napus
  source 1..22: mol_type = genomic DNA
ggcttcgccatcgccttcgcca

SEQ ID NO: 1679 - DNA, 22 bp, Brassica napus
  source 1..22: mol_type = genomic DNA
agaatcgtcatcgcttcagccg

SEQ ID NO: 1680 - DNA, 22 bp, Brassica napus
  source 1..22: mol_type = genomic DNA
ggagtcgtaatcgctaccgcca

SEQ ID NO: 1681 - DNA, 22 bp, Brassica napus
  source 1..22: mol_type = genomic DNA
agatacgtcatctctggcgcca

SEQ ID NO: 1682 - DNA, 22 bp, Brassica napus
  source 1..22: mol_type = genomic DNA
cgatccgtcgacgattacgcca

SEQ ID NO: 1683 - DNA, 22 bp, Brassica napus
  source 1..22: mol_type = genomic DNA
tggtccatcaccgctaacgcca

SEQ ID NO: 1684 - DNA, 22 bp, Brassica napus
  source 1..22: mol_type = genomic DNA
tggttcgacttcgcttacggcg

SEQ ID NO: 1685 - DNA, 22 bp, Brassica napus
  source 1..22: mol_type = genomic DNA
tgactcgtcagcacttccgccg

SEQ ID NO: 1686 - DNA, 22 bp, Brassica napus
  source 1..22: mol_type = genomic DNA
tgaatcgtcctcgctttcaccg

SEQ ID NO: 1687 - DNA, 22 bp, Brassica napus
  source 1..22: mol_type = genomic DNA
tggatcgtcatcgtctacgccg

SEQ ID NO: 1688 - DNA, 22 bp, Brassica napus
  source 1..22: mol_type = genomic DNA
tgtatcgtcgtcgcctaggcca

SEQ ID NO: 1689 - DNA, 22 bp, Brassica napus
  source 1..22: mol_type = genomic DNA
tcaaccgtcatcgcatccgcca

SEQ ID NO: 1690 - DNA, 22 bp, Brassica napus
  source 1..22: mol_type = genomic DNA
tgtttcgtcctcacttgcgccg

SEQ ID NO: 1691 - DNA, 22 bp, Brassica napus
  source 1..22: mol_type = genomic DNA
tgctccgtcatcgcctgcacca

SEQ ID NO: 1692 - DNA, 22 bp, Brassica napus
  source 1..22: mol_type = genomic DNA
tgactcctcgccgcttacgccg

SEQ ID NO: 1693 - DNA, 22 bp, Brassica napus
  source 1..22: mol_type = genomic DNA
tgtttcgtcaaagctctcgcca

SEQ ID NO: 1694 - DNA, 22 bp, Brassica napus
  source 1..22: mol_type = genomic DNA
tgattcgtcatctccgccgccg

SEQ ID NO: 1695 - DNA, 22 bp, Brassica napus
  source 1..22: mol_type = genomic DNA
agattcgtcttcgcttccgctg

SEQ ID NO: 1696 - DNA, 22 bp, Brassica napus
  source 1..22: mol_type = genomic DNA
cgattccccagcgcctacgcca

SEQ ID NO: 1697 - DNA, 22 bp, Brassica napus
  source 1..22: mol_type = genomic DNA
tgaatcgccctctctcacgcca

SEQ ID NO: 1698 - DNA, 22 bp, Brassica napus
  source 1..22: mol_type = genomic DNA
tgcttcctcctcgcatacgcct

SEQ ID NO: 1699 - DNA, 22 bp, Brassica napus
  source 1..22: mol_type = genomic DNA
cgactcgtcttcgctttcacca

SEQ ID NO: 1700 - DNA, 22 bp, Brassica napus
  source 1..22: mol_type = genomic DNA
cgatccgtcatcgtttgcgcct

SEQ ID NO: 1701 - DNA, 22 bp, Brassica napus
  source 1..22: mol_type = genomic DNA
ggtctcgtcatcgtttccgcca

SEQ ID NO: 1702 - DNA, 22 bp, Brassica napus
  source 1..22: mol_type = genomic DNA
ggtttcgtcacctcttccgcca

SEQ ID NO: 1703 - DNA, 22 bp, Brassica napus
  source 1..22: mol_type = genomic DNA
tgaatctccttcgcttacgcct

SEQ ID NO: 1704 - DNA, 22 bp, Brassica napus
  source 1..22: mol_type = genomic DNA
tgcttcgtcatcgcctgctcct

SEQ ID NO: 1705 - DNA, 22 bp, Brassica napus
  source 1..22: mol_type = genomic DNA
agattagtcatcgctagagcca

SEQ ID NO: 1706 - DNA, 22 bp, Brassica napus
  source 1..22: mol_type = genomic DNA
agattcgtcatcggagacacca

SEQ ID NO: 1707 - DNA, 22 bp, Brassica napus
  source 1..22: mol_type = genomic DNA
cgattcgtcctctccttcgcca

SEQ ID NO: 1708 - DNA, 22 bp, Brassica napus
  source 1..22: mol_type = genomic DNA
agatccatcatcgctaacgaca

SEQ ID NO: 1709 - DNA, 22 bp, Brassica napus
  source 1..22: mol_type = genomic DNA
cgattagtcatcgcaaaagcca

SEQ ID NO: 1710 - DNA, 22 bp, Brassica napus
  source 1..22: mol_type = genomic DNA
agattcgtcaaagctttcacca

SEQ ID NO: 1711 - DNA, 22 bp, Brassica napus
  source 1..22: mol_type = genomic DNA
ggattcgtcaaggactacgcca

SEQ ID NO: 1712 - DNA, 22 bp, Brassica napus
  source 1..22: mol_type = genomic DNA
tgatttgtcaaagcagacgcca

SEQ ID NO: 1713 - DNA, 22 bp, Brassica napus
  source 1..22: mol_type = genomic DNA
agatttgtcatcgcggacacca

SEQ ID NO: 1714 - DNA, 22 bp, Brassica napus
  source 1..22: mol_type = genomic DNA
tgaatcgtcatcgctgaagctg

SEQ ID NO: 1715 - DNA, 22 bp, Brassica napus
  source 1..22: mol_type = genomic DNA
agattcgccatcgctaaatcca

SEQ ID NO: 1716 - DNA, 22 bp, Brassica napus
  source 1..22: mol_type = genomic DNA
tgagtcctcatcgctatcacca

SEQ ID NO: 1717 - DNA, 22 bp, Brassica napus
  source 1..22: mol_type = genomic DNA
tgatacgtcaccgcttacgatg

SEQ ID NO: 1718 - DNA, 22 bp, Brassica napus
  source 1..22: mol_type = genomic DNA
agatacgtaatcgctttcgcta

SEQ ID NO: 1719 - DNA, 22 bp, Zea mays
  source 1..22: mol_type = genomic DNA
tgatccgtcaacgctaacgcct

SEQ ID NO: 1720 - DNA, 22 bp, Zea mays
  source 1..22: mol_type = genomic DNA
tgattcgtcgtcgccgccgcca

SEQ ID NO: 1721 - DNA, 22 bp, Zea mays
  source 1..22: mol_type = genomic DNA
tgatccgccatcgcttgcgcct

SEQ ID NO: 1722 - DNA, 22 bp, Zea mays
  source 1..22: mol_type = genomic DNA
tgatccgtcaccgctcacgcct

SEQ ID NO: 1723 - DNA, 22 bp, Zea mays
  source 1..22: mol_type = genomic DNA
tgatttgtcaacgcggacgcca

SEQ ID NO: 1724 - DNA, 22 bp, Zea mays
  source 1..22: mol_type = genomic DNA
tcagtcgtccacgcttacgcca

SEQ ID NO: 1725 - DNA, 22 bp, Zea mays
  source 1..22: mol_type = genomic DNA
tgtctagtcatcgcatacgcca

SEQ ID NO: 1726 - DNA, 22 bp, Zea mays
  source 1..22: mol_type = genomic DNA
tgagtcttcagcgcctacgcca

SEQ ID NO: 1727 - DNA, 22 bp, Zea mays
  source 1..22: mol_type = genomic DNA
tgcttcgtgatcgcttgcgcct

SEQ ID NO: 1728 - DNA, 22 bp, Zea mays
  source 1..22: mol_type = genomic DNA
tgattcgtgctcgcttaggccc

SEQ ID NO: 1729 - DNA, 22 bp, Zea mays
  source 1..22: mol_type = genomic DNA
tgcttcgtgatcgcttgtgcca

SEQ ID NO: 1730 - DNA, 22 bp, Zea mays
  source 1..22: mol_type = genomic DNA
cgattcttcatcacctacgcca

SEQ ID NO: 1731 - DNA, 22 bp, Zea mays
  source 1..22: mol_type = genomic DNA
tgattcttcatcgccttcacca

SEQ ID NO: 1732 - DNA, 22 bp, Zea mays
  source 1..22: mol_type = genomic DNA
agtttcgtcattgcttacgtca

SEQ ID NO: 1733 - DNA, 22 bp, Zea mays
  source 1..22: mol_type = genomic DNA
cgattcgtcatccctttcccca

SEQ ID NO: 1734 - DNA, 22 bp, Zea mays
  source 1..22: mol_type = genomic DNA
tgaatcgtgatcggttacacca

SEQ ID NO: 1735 - DNA, 22 bp, Zea mays
  source 1..22: mol_type = genomic DNA
tcattcgtcatatcgtacgcca

SEQ ID NO: 1736 - DNA, 22 bp, Zea mays
  source 1..22: mol_type = genomic DNA
tgattattcatcgctcacgcga

SEQ ID NO: 1737 - DNA, 22 bp, Zea mays
  source 1..22: mol_type = genomic DNA
tcattcttcatcgctttcacca

SEQ ID NO: 1738 - DNA, 22 bp, Zea mays
  source 1..22: mol_type = genomic DNA
taattcgtcatcgcttacataa

SEQ ID NO: 1739 - DNA, 22 bp, Zea mays
  source 1..22: mol_type = genomic DNA
tgaaacgtcagcgcgaacgcca

SEQ ID NO: 1740 - DNA, 22 bp, Zea mays
  source 1..22: mol_type = genomic DNA
agaatcgacatcgcctacgccg

SEQ ID NO: 1741 - DNA, 22 bp, Zea mays
  source 1..22: mol_type = genomic DNA
cgaatcgacagcgctgacgcca

SEQ ID NO: 1742 - DNA, 22 bp, Zea mays
  source 1..22: mol_type = genomic DNA
ggattcgacaccgctaacgccg

SEQ ID NO: 1743 - DNA, 22 bp, Zea mays
  source 1..22: mol_type = genomic DNA
agggtcgtcctcgctaacgcca

SEQ ID NO: 1744 - DNA, 22 bp, Zea mays
  source 1..22: mol_type = genomic DNA
aggtccgacatcgcttacgccg

SEQ ID NO: 1745 - DNA, 22 bp, Zea mays
  source 1..22: mol_type = genomic DNA
tggatcgtcgtcgctcacgccg

SEQ ID NO: 1746 - DNA, 22 bp, Zea mays
  source 1..22: mol_type = genomic DNA
agcatcgtcaccgcgtacgcca

SEQ ID NO: 1747 - DNA, 22 bp, Zea mays
  source 1..22: mol_type = genomic DNA
aggcccgacatcgcttacgcca

SEQ ID NO: 1748 - DNA, 22 bp, Zea mays
  source 1..22: mol_type = genomic DNA
tgacacgacatcgcctacgccg

SEQ ID NO: 1749 - DNA, 22 bp, Zea mays
  source 1..22: mol_type = genomic DNA
ggattcgacaccgctcacgccg

SEQ ID NO: 1750 - DNA, 22 bp, Zea mays
  source 1..22: mol_type = genomic DNA
tgccacgtcagcgctgacgcca

SEQ ID NO: 1751 - DNA, 22 bp, Zea mays
  source 1..22: mol_type = genomic DNA
tggctcgtcaccgcggacgcca

SEQ ID NO: 1752 - DNA, 22 bp, Zea mays
  source 1..22: mol_type = genomic DNA
tgcgtcgtcatcgccgacgccg

SEQ ID NO: 1753 - DNA, 22 bp, Zea mays
  source 1..22: mol_type = genomic DNA
tgcttcgccagcgctggcgcca

SEQ ID NO: 1754 - DNA, 22 bp, Zea mays
  source 1..22: mol_type = genomic DNA
agacccgacatcgcctacgcca

SEQ ID NO: 1755 - DNA, 22 bp, Zea mays
  source 1..22: mol_type = genomic DNA
tgacccgacaacgcctacgcca

SEQ ID NO: 1756 - DNA, 22 bp, Zea mays
  source 1..22: mol_type = genomic DNA
cgacccgacatcgcttacgccg

SEQ ID NO: 1757 - DNA, 22 bp, Zea mays
  source 1..22: mol_type = genomic DNA
cggcccgacatcgcttacgcca

SEQ ID NO: 1758 - DNA, 22 bp, Zea mays
  source 1..22: mol_type = genomic DNA
cgtaccgacatcgcttacgcca

SEQ ID NO: 1759 - DNA, 22 bp, Zea mays
  source 1..22: mol_type = genomic DNA
tgcttcgtcaccgcagccgcca

SEQ ID NO: 1760 - DNA, 22 bp, Zea mays
  source 1..22: mol_type = genomic DNA
tggctcgtcaccgccgacgcca

SEQ ID NO: 1761 - DNA, 22 bp, Zea mays
  source 1..22: mol_type = genomic DNA
tggttcgtcctcgccatcgcca

SEQ ID NO: 1762 - DNA, 22 bp, Zea mays
  source 1..22: mol_type = genomic DNA
cgcttcgtcgtcgcccacgcca

SEQ ID NO: 1763 - DNA, 22 bp, Zea mays
  source 1..22: mol_type = genomic DNA
ggattcgccatcgcctccgcct

SEQ ID NO: 1764 - DNA, 22 bp, Zea mays
  source 1..22: mol_type = genomic DNA
tgatccgtcaccgctcgcgcct

SEQ ID NO: 1765 - DNA, 22 bp, Zea mays
  source 1..22: mol_type = genomic DNA
agaaacgtcaacgcttacgcga

SEQ ID NO: 1766 - DNA, 22 bp, Zea mays
  source 1..22: mol_type = genomic DNA
cgatccgtcatcgcctccgcct

SEQ ID NO: 1767 - DNA, 22 bp, Zea mays
  source 1..22: mol_type = genomic DNA
ggagacgtcatcgattccgcca

SEQ ID NO: 1768 - DNA, 22 bp, Zea mays
  source 1..22: mol_type = genomic DNA
tgattcggcagcgcctgcgaca

SEQ ID NO: 1769 - DNA, 22 bp, Zea mays
  source 1..22: mol_type = genomic DNA
tgaatcgtcgtcgcgtgcccca

SEQ ID NO: 1770 - DNA, 22 bp, Zea mays
  source 1..22: mol_type = genomic DNA
tgattggtccacgcgtgcgcca

SEQ ID NO: 1771 - DNA, 22 bp, Zea mays
  source 1..22: mol_type = genomic DNA
tgagacgtcatcgatttcgccg

SEQ ID NO: 1772 - DNA, 22 bp, Zea mays
  source 1..22: mol_type = genomic DNA
acatacgtcctcgcatacgcca

SEQ ID NO: 1773 - DNA, 22 bp, Zea mays
  source 1..22: mol_type = genomic DNA
cggttagacatcgcctacgcca

SEQ ID NO: 1774 - DNA, 22 bp, Zea mays
  source 1..22: mol_type = genomic DNA
tgattcgacctcgccgacgaca

SEQ ID NO: 1775 - DNA, 22 bp, Zea mays
  source 1..22: mol_type = genomic DNA
ggtttcgtcgtcgcgtacggca

SEQ ID NO: 1776 - DNA, 22 bp, Zea mays
  source 1..22: mol_type = genomic DNA
tgagtcatcagcgcccacgcca

SEQ ID NO: 1777 - DNA, 22 bp, Zea mays
  source 1..22: mol_type = genomic DNA
tgaatcgtcaccgcgtgcccca

SEQ ID NO: 1778 - DNA, 22 bp, Zea mays
  source 1..22: mol_type = genomic DNA
agcttcttcatcgcgaacgcca

SEQ ID NO: 1779 - DNA, 22 bp, Zea mays
  source 1..22: mol_type = genomic DNA
tgctacgtcatcgcgtacacct

SEQ ID NO: 1780 - DNA, 22 bp, Zea mays
  source 1..22: mol_type = genomic DNA
cgcttcgtcgtggctgacgcca

SEQ ID NO: 1781 - DNA, 22 bp, Zea mays
  source 1..22: mol_type = genomic DNA
ctgttcgtcaacgcgtacgcca

SEQ ID NO: 1782 - DNA, 22 bp, Zea mays
  source 1..22: mol_type = genomic DNA
ggacacgtcatcgcttacgcgt

SEQ ID NO: 1783 - DNA, 22 bp, Zea mays
  source 1..22: mol_type = genomic DNA
ggattcgacatcgcgtccgtca

SEQ ID NO: 1784 - DNA, 22 bp, Zea mays
  source 1..22: mol_type = genomic DNA
tgctgcgtcatcggttgcgcct

SEQ ID NO: 1785 - DNA, 22 bp, Zea mays
  source 1..22: mol_type = genomic DNA
tgcttcttcgtcgctggcgcca

SEQ ID NO: 1786 - DNA, 22 bp, Zea mays
  source 1..22: mol_type = genomic DNA
tgtttcgtcgtcgctgacggcc

SEQ ID NO: 1787 - DNA, 22 bp, Zea mays
  source 1..22: mol_type = genomic DNA
accttcgtcatcgctgccgcca

SEQ ID NO: 1788 - DNA, 22 bp, Zea mays
  source 1..22: mol_type = genomic DNA
ggactcgtcatcccgcacgcca

SEQ ID NO: 1789 - DNA, 22 bp, Zea mays
  source 1..22: mol_type = genomic DNA
tgactcgacatcgccgacgcta

SEQ ID NO: 1790 - DNA, 22 bp, Zea mays
  source 1..22: mol_type = genomic DNA
tgatccgatatcgccgacgcca

SEQ ID NO: 1791 - DNA, 22 bp, Zea mays
  source 1..22: mol_type = genomic DNA
tgctgcgccaccgcttaggcca

SEQ ID NO: 1792 - DNA, 22 bp, Zea mays
  source 1..22: mol_type = genomic DNA
cgactcgtcgtcgcttgcccca

SEQ ID NO: 1793 - DNA, 22 bp, Zea mays
  source 1..22: mol_type = genomic DNA
tgcttcgtcgtggcccacgcca

SEQ ID NO: 1794 - DNA, 22 bp, Zea mays
  source 1..22: mol_type = genomic DNA
tcatccgtcatcgcattcgccg

SEQ ID NO: 1795 - DNA, 22 bp, Zea mays
  source 1..22: mol_type = genomic DNA
tgagtcttcagcgcccacgcca

SEQ ID NO: 1796 - DNA, 22 bp, Zea mays
  source 1..22: mol_type = genomic DNA
tgcatcgtcatctcgtccgcca

SEQ ID NO: 1797 - DNA, 22 bp, Zea mays
  source 1..22: mol_type = genomic DNA
tgagtcttcagcgcctacgccc

SEQ ID NO: 1798 - DNA, 22 bp, Zea mays
  source 1..22: mol_type = genomic DNA
tgagtcttcagcgctcacgccc

SEQ ID NO: 1799 - DNA, 22 bp, Zea mays
  source 1..22: mol_type = genomic DNA
tgactcgtcatcgttgccgccg

SEQ ID NO: 1800 - DNA, 22 bp, Zea mays
  source 1..22: mol_type = genomic DNA
tgcttcgccatcgctgacgcgt

SEQ ID NO: 1801 - DNA, 22 bp, Zea mays
  source 1..22: mol_type = genomic DNA
tgcttcgtcagggctctcgcca

SEQ ID NO: 1802 - DNA, 22 bp, Oryza sativa
  source 1..22: mol_type = genomic DNA
ggagccgtcatcgcctacgcca

SEQ ID NO: 1803 - DNA, 22 bp, Oryza sativa
  source 1..22: mol_type = genomic DNA
tgatgcgtcaccgcctgcgcca

SEQ ID NO: 1804 - DNA, 22 bp, Oryza sativa
  source 1..22: mol_type = genomic DNA
tgttccgtcatcggtcacgcca

SEQ ID NO: 1805 - DNA, 22 bp, Oryza sativa
  source 1..22: mol_type = genomic DNA
tgattcgtcatcgctatcgtct

SEQ ID NO: 1806 - DNA, 22 bp, Oryza sativa
  source 1..22: mol_type = genomic DNA
tgcttcgtcatcgtctacgccc

SEQ ID NO: 1807 - DNA, 22 bp, Oryza sativa
  source 1..22: mol_type = genomic DNA
tgctgcatcatctcttacgcca

SEQ ID NO: 1808 - DNA, 22 bp, Oryza sativa
  source 1..22: mol_type = genomic DNA
tgcttcgtcaccgcttacgtaa

SEQ ID NO: 1809 - DNA, 22 bp, Oryza sativa
  source 1..22: mol_type = genomic DNA
tgattcgtcttctctttcgcaa

SEQ ID NO: 1810 - DNA, 22 bp, Oryza sativa
  source 1..22: mol_type = genomic DNA
tgtttcgtcatcgctttctaca

SEQ ID NO: 1811 - DNA, 22 bp, Oryza sativa
  source 1..22: mol_type = genomic DNA
atattggtcatagcttacgcca

SEQ ID NO: 1812 - DNA, 22 bp, Oryza sativa
  source 1..22: mol_type = genomic DNA
atattcatcattgcttacgcca

SEQ ID NO: 1813 - DNA, 22 bp, Oryza sativa
  source 1..22: mol_type = genomic DNA
ggaatcgacatcgcgcacgcca

SEQ ID NO: 1814 - DNA, 22 bp, Oryza sativa
  source 1..22: mol_type = genomic DNA
ggtgacgtcatcgctgacgcca

SEQ ID NO: 1815 - DNA, 22 bp, Oryza sativa
  source 1..22: mol_type = genomic DNA
cggttcgtcgtcgctgacgccg

SEQ ID NO: 1816 - DNA, 22 bp, Oryza sativa
  source 1..22: mol_type = genomic DNA
agcatcgtcaccgcgtacgcca

SEQ ID NO: 1817 - DNA, 22 bp, Oryza sativa
  source 1..22: mol_type = genomic DNA
cgaatcgtcaccgctgacgccg

SEQ ID NO: 1818 - DNA, 22 bp, Oryza sativa
  source 1..22: mol_type = genomic DNA
tgattcgtcgtcgccgccgccg

SEQ ID NO: 1819 - DNA, 22 bp, Oryza sativa
  source 1..22: mol_type = genomic DNA
tgattcgtcaccgccaccgccg

SEQ ID NO: 1820 - DNA, 22 bp, Oryza sativa
  source 1..22: mol_type = genomic DNA
ggactcgccatcgctgccgcca

SEQ ID NO: 1821 - DNA, 22 bp, Oryza sativa
  source 1..22: mol_type = genomic DNA
tggctcgtcaccgccgacgcca

SEQ ID NO: 1822 - DNA, 22 bp, Oryza sativa
  source 1..22: mol_type = genomic DNA
ggatacgtcgtcgcctacacca

SEQ ID NO: 1823 - DNA, 22 bp, Oryza sativa
  source 1..22: mol_type = genomic DNA
tatgacgtcatcgctgacgcca

SEQ ID NO: 1824 - DNA, 22 bp, Oryza sativa
  source 1..22: mol_type = genomic DNA
agattcgccgtcgatcacgcca

SEQ ID NO: 1825 - DNA, 22 bp, Oryza sativa
  source 1..22: mol_type = genomic DNA
tgcttcgtcgtagcatccgcca

SEQ ID NO: 1826 - DNA, 22 bp, Oryza sativa
  source 1..22: mol_type = genomic DNA
tggttcgtcatcgccgccgaca

SEQ ID NO: 1827 - DNA, 22 bp, Oryza sativa
  source 1..22: mol_type = genomic DNA
tcgttcgtcgtcgccgacgcca

SEQ ID NO: 1828 - DNA, 22 bp, Oryza sativa
  source 1..22: mol_type = genomic DNA
tgcctcgtcatcggtgacgccg

SEQ ID NO: 1829 - DNA, 22 bp, Oryza sativa
  source 1..22: mol_type = genomic DNA
tgtttcgtcgtagcatccgcca

SEQ ID NO: 1830 - DNA, 22 bp, Oryza sativa
  source 1..22: mol_type = genomic DNA
tccttcggcatcgctgccgcca

SEQ ID NO: 1831 - DNA, 22 bp, Oryza sativa
  source 1..22: mol_type = genomic DNA
tgctgcgtcatcccatacgcct

SEQ ID NO: 1832 - DNA, 22 bp, Oryza sativa
  source 1..22: mol_type = genomic DNA
cgactcgtcgtcgctgacgtca

SEQ ID NO: 1833 - DNA, 22 bp, Oryza sativa
  source 1..22: mol_type = genomic DNA
tgtttcggcttcgattacgcct

SEQ ID NO: 1834 - DNA, 22 bp, Oryza sativa
  source 1..22: mol_type = genomic DNA
tgcttcgccttcgcttgcccca

SEQ ID NO: 1835 - DNA, 22 bp, Oryza sativa
  source 1..22: mol_type = genomic DNA
tgcttcttcctcgcttccgccg

SEQ ID NO: 1836 - DNA, 22 bp, Oryza sativa
  source 1..22: mol_type = genomic DNA
tgagttgccatcgctttcgcct

SEQ ID NO: 1837 - DNA, 22 bp, Oryza sativa
  source 1..22: mol_type = genomic DNA
tcctccgccatcgctttcgcca

SEQ ID NO: 1838 - DNA, 22 bp, Oryza sativa
  source 1..22: mol_type = genomic DNA
tcttccgccatcgctttcgcca

SEQ ID NO: 1839 - DNA, 22 bp, Oryza sativa
  source 1..22: mol_type = genomic DNA
tgcttcgtcctcgccttctcca

SEQ ID NO: 1840 - DNA, 22 bp, Oryza sativa
  source 1..22: mol_type = genomic DNA
tgcttcgtcagagctaacacca

SEQ ID NO: 1841 - DNA, 22 bp, Oryza sativa
  source 1..22: mol_type = genomic DNA
tgagccgtcaaagcttaggcca

SEQ ID NO: 1842 - DNA, 22 bp, Oryza sativa
  source 1..22: mol_type = genomic DNA
gacttggtcatcgctaacgcca

SEQ ID NO: 1843 - DNA, 22 bp, Oryza sativa
  source 1..22: mol_type = genomic DNA
gaatgcgtcatggctcacgcca

SEQ ID NO: 1844 - DNA, 22 bp, Oryza sativa
  source 1..22: mol_type = genomic DNA
tgatacaccatcggctacgcca

SEQ ID NO: 1845 - DNA, 22 bp, Oryza sativa
  source 1..22: mol_type = genomic DNA
tcatacgtcgtcgctaacccca

SEQ ID NO: 1846 - DNA, 22 bp, Oryza sativa
  source 1..22: mol_type = genomic DNA
tgcttcgtgatcgcacacacca

SEQ ID NO: 1847 - DNA, 22 bp, Oryza sativa
  source 1..22: mol_type = genomic DNA
tgatacgccattgatgacgcca

SEQ ID NO: 1848 - DNA, 22 bp, Oryza sativa
  source 1..22: mol_type = genomic DNA
ggattcgtcgtcgattccccca

SEQ ID NO: 1849 - DNA, 22 bp, Oryza sativa
  source 1..22: mol_type = genomic DNA
tgacagtgcatcgcttacgcca

SEQ ID NO: 1850 - DNA, 22 bp, Oryza sativa
  source 1..22: mol_type = genomic DNA
gggttcttcaccgattacgcca

SEQ ID NO: 1851 - DNA, 22 bp, Oryza sativa
  source 1..22: mol_type = genomic DNA
tgactcgtgatcacgtacgcct

SEQ ID NO: 1852 - DNA, 22 bp, Oryza sativa
  source 1..22: mol_type = genomic DNA
tatgtcgtcatcgctaacgtca

SEQ ID NO: 1853 - DNA, 22 bp, Oryza sativa
  source 1..22: mol_type = genomic DNA
tgaggcgtcatcgcctactcga

SEQ ID NO: 1854 - DNA, 22 bp, Oryza sativa
  source 1..22: mol_type = genomic DNA
ggatttgtcatcgctgccggca

SEQ ID NO: 1855 - DNA, 22 bp, Oryza sativa
  source 1..22: mol_type = genomic DNA
tgctttgtcaaagctcacgcca

SEQ ID NO: 1856 - DNA, 22 bp, Oryza sativa
  source 1..22: mol_type = genomic DNA
tgatccttcaccacgtacgcca

SEQ ID NO: 1857 - DNA, 22 bp, Oryza sativa
  source 1..22: mol_type = genomic DNA
tgatgcttcgtcgtttgcgcca

SEQ ID NO: 1858 - DNA, 22 bp, Oryza sativa
  source 1..22: mol_type = genomic DNA
tgcagcctcatcgcttacgtca

SEQ ID NO: 1859 - DNA, 22 bp, Oryza sativa
  source 1..22: mol_type = genomic DNA
tgatgggccatcgcttcctcca

SEQ ID NO: 1860 - DNA, 22 bp, Oryza sativa
  source 1..22: mol_type = genomic DNA
tgattcttcgctgctaacgcca

SEQ ID NO: 1861 - DNA, 22 bp, Oryza sativa
  source 1..22: mol_type = genomic DNA
cgattccccatcgattccgcca

SEQ ID NO: 1862 - DNA, 22 bp, Oryza sativa
  source 1..22: mol_type = genomic DNA
tgatgcgtcatcgtcgacgtca

SEQ ID NO: 1863 - DNA, 22 bp, Oryza sativa
  source 1..22: mol_type = genomic DNA
tgttttgccatcgattgcgcca

SEQ ID NO: 1864 - DNA, 22 bp, Oryza sativa
  source 1..22: mol_type = genomic DNA
ttacgcgtcatcgctttggcca

SEQ ID NO: 1865 - DNA, 22 bp, Oryza sativa
  source 1..22: mol_type = genomic DNA
tgatgtgtcatcgctttcgact

SEQ ID NO: 1866 - DNA, 22 bp, Oryza sativa
  source 1..22: mol_type = genomic DNA
tgttgcttcatcgctttcgaca

SEQ ID NO: 1867 - DNA, 22 bp, Oryza sativa
  source 1..22: mol_type = genomic DNA
tgattcgtcgtagcttttgcct

SEQ ID NO: 1868 - DNA, 22 bp, Oryza sativa
  source 1..22: mol_type = genomic DNA
tccttcgttaacgcttacgcct

SEQ ID NO: 1869 - DNA, 22 bp, Oryza sativa
  source 1..22: mol_type = genomic DNA
tccttcgccattgctttcgcca

SEQ ID NO: 1870 - DNA, 22 bp, Oryza sativa
  source 1..22: mol_type = genomic DNA
tgattcgtcatcgtcctcgtca

SEQ ID NO: 1871 - DNA, 22 bp, Oryza sativa
  source 1..22: mol_type = genomic DNA
tcgatcgtcatcgattacacca

SEQ ID NO: 1872 - DNA, 22 bp, Oryza sativa
  source 1..22: mol_type = genomic DNA
tgattgatcatcgcctgagcca

SEQ ID NO: 1873 - DNA, 22 bp, Oryza sativa
  source 1..22: mol_type = genomic DNA
tgatccatcatcacttccgcaa

SEQ ID NO: 1874 - DNA, 22 bp, Oryza sativa
  source 1..22: mol_type = genomic DNA
tggttagtcatcgctgatggca

SEQ ID NO: 1875 - DNA, 22 bp, Glycine max
  source 1..22: mol_type = genomic DNA
agattcatcatcgccttcgcca

SEQ ID NO: 1876 - DNA, 22 bp, Glycine max
  source 1..22: mol_type = genomic DNA
ttagccgtcatcgctaacgcca

SEQ ID NO: 1877 - DNA, 22 bp, Glycine max
  source 1..22: mol_type = genomic DNA
ttagccgtcatcgctgacgcca

SEQ ID NO: 1878 - DNA, 22 bp, Glycine max
  source 1..22: mol_type = genomic DNA
tcattcggcatcgctttcgaca

SEQ ID NO: 1879 - DNA, 22 bp, Glycine max
  source 1..22: mol_type = genomic DNA
tgcttcgtcatcgattgcgcta

SEQ ID NO: 1880 - DNA, 22 bp, Glycine max
  source 1..22: mol_type = genomic DNA
tgcttcgtaatcgcttttgcca

SEQ ID NO: 1881 - DNA, 22 bp, Glycine max
  source 1..22: mol_type = genomic DNA
tgattcagcatcgcttacacaa

SEQ ID NO: 1882 - DNA, 22 bp, Glycine max
  source 1..22: mol_type = genomic DNA
tgattggtcataacttgcgcca

SEQ ID NO: 1883 - DNA, 22 bp, Glycine max
  source 1..22: mol_type = genomic DNA
tgattagccatgacttacgcca

SEQ ID NO: 1884 - DNA, 22 bp, Glycine max
  source 1..22: mol_type = genomic DNA
tgattggccataacttacgcca

SEQ ID NO: 1885 - DNA, 22 bp, Glycine max
  source 1..22: mol_type = genomic DNA
tgattcttcttctcttacccca

SEQ ID NO: 1886 - DNA, 22 bp, Glycine max
  source 1..22: mol_type = genomic DNA
tgatttatcatggcttaagcca

SEQ ID NO: 1887 - DNA, 22 bp, Glycine max
  source 1..22: mol_type = genomic DNA
tcattcttgatcgcttactcca

SEQ ID NO: 1888 - DNA, 22 bp, Glycine max
  source 1..22: mol_type = genomic DNA
tgcctcgtcgacgcgtacgcca

SEQ ID NO: 1889 - DNA, 22 bp, Glycine max
  source 1..22: mol_type = genomic DNA
ggagtcgtcatcgccgccgcca

SEQ ID NO: 1890 - DNA, 22 bp, Glycine max
  source 1..22: mol_type = genomic DNA
tgatgcgacgtcgcataagcca

SEQ ID NO: 1891 - DNA, 22 bp, Glycine max
  source 1..22: mol_type = genomic DNA
ggagtcgtcatcgccgacggca

SEQ ID NO: 1892 - DNA, 22 bp, Glycine max
  source 1..22: mol_type = genomic DNA
agactcgtgaacgctcacgcca

SEQ ID NO: 1893 - DNA, 22 bp, Glycine max
  source 1..22: mol_type = genomic DNA
tggttcgacaacccttccgcca

SEQ ID NO: 1894 - DNA, 22 bp, Glycine max
  source 1..22: mol_type = genomic DNA
cgaaccgttatcgctaacgcca

SEQ ID NO: 1895 - DNA, 22 bp, Glycine max
  source 1..22: mol_type = genomic DNA
tgctccgtcatcaccgacgcca

SEQ ID NO: 1896 - DNA, 22 bp, Glycine max
  source 1..22: mol_type = genomic DNA
tccgtcgtcaccgctgacgcca

SEQ ID NO: 1897 - DNA, 22 bp, Glycine max
  source 1..22: mol_type = genomic DNA
cgattggccatcgcattcgcca

SEQ ID NO: 1898 - DNA, 22 bp, Glycine max
  source 1..22: mol_type = genomic DNA
tgatacgtcatcgccaatgcct

SEQ ID NO: 1899 - DNA, 22 bp, Glycine max
  source 1..22: mol_type = genomic DNA
tgattcaccaacgctttcgcct

SEQ ID NO: 1900 - DNA, 22 bp, Glycine max
  source 1..22: mol_type = genomic DNA
gttctcgtcatcgcttacgccg

SEQ ID NO: 1901 - DNA, 22 bp, Glycine max
  source 1..22: mol_type = genomic DNA
tgcttcgtcctcgccgacgtca

SEQ ID NO: 1902 - DNA, 22 bp, Glycine max
  source 1..22: mol_type = genomic DNA
ccactcgtcatcgctcacgccc

SEQ ID NO: 1903 - DNA, 22 bp, Glycine max
  source 1..22: mol_type = genomic DNA
tgattcgtcaatgccttcgcct

SEQ ID NO: 1904 - DNA, 22 bp, Glycine max
  source 1..22: mol_type = genomic DNA
tgcttcgtcgtcgcctacgtct

SEQ ID NO: 1905 - DNA, 22 bp, Glycine max
  source 1..22: mol_type = genomic DNA
ggattagtcaacgctaaagcca

SEQ ID NO: 1906 - DNA, 22 bp, Glycine max
  source 1..22: mol_type = genomic DNA
tgattaggcaacacatacgcca

SEQ ID NO: 1907 - DNA, 22 bp, Glycine max
  source 1..22: mol_type = genomic DNA
tgcttcgtcaacgaatacacca

SEQ ID NO: 1908 - DNA, 22 bp, Glycine max
  source 1..22: mol_type = genomic DNA
tgattaggcaccacatacgcca

SEQ ID NO: 1909 - DNA, 22 bp, Glycine max
  source 1..22: mol_type = genomic DNA
tgattaggcaccgcatacacca

SEQ ID NO: 1910 - DNA, 22 bp, Glycine max
  source 1..22: mol_type = genomic DNA
tgattcggcaccacatacacca

SEQ ID NO: 1911 - DNA, 22 bp, Glycine max
  source 1..22: mol_type = genomic DNA
agattcatccgcggttacgcca

SEQ ID NO: 1912 - DNA, 22 bp, Glycine max
  source 1..22: mol_type = genomic DNA
agattcgacaccgcttaaccca

SEQ ID NO: 1913 - DNA, 22 bp, Glycine max
  source 1..22: mol_type = genomic DNA
ggagtcgtcatcggatatgcca

SEQ ID NO: 1914 - DNA, 22 bp, Glycine max
  source 1..22: mol_type = genomic DNA
tgaatcgtcaccaactacgcca

SEQ ID NO: 1915 - DNA, 22 bp, Glycine max
  source 1..22: mol_type = genomic DNA
tgaatcgtcgtcgtttacgacg

SEQ ID NO: 1916 - DNA, 22 bp, Glycine max
  source 1..22: mol_type = genomic DNA
cgatacgacatcgtttaggcca

SEQ ID NO: 1917 - DNA, 22 bp, Glycine max
  source 1..22: mol_type = genomic DNA
tggttcgacactgcttaagcca

SEQ ID NO: 1918 - DNA, 22 bp, Glycine max
  source 1..22: mol_type = genomic DNA
tgattcgccagctgatacgcca

SEQ ID NO: 1919 - DNA, 22 bp, Glycine max
  source 1..22: mol_type = genomic DNA
agtgttgtcatcgcttaagcca

SEQ ID NO: 1920 - DNA, 22 bp, Glycine max
  source 1..22: mol_type = genomic DNA
tcattcctcaacgccaacgcca

SEQ ID NO: 1921 - DNA, 22 bp, Glycine max
  source 1..22: mol_type = genomic DNA
tggtacgtcatcgttaatgcca

SEQ ID NO: 1922 - DNA, 22 bp, Glycine max
  source 1..22: mol_type = genomic DNA
cgattcgccatcgattacgcac

SEQ ID NO: 1923 - DNA, 22 bp, Glycine max
  source 1..22: mol_type = genomic DNA
tgattcacccccgcttacacca

SEQ ID NO: 1924 - DNA, 22 bp, Glycine max
  source 1..22: mol_type = genomic DNA
tgagttgacatcggttacgcct

SEQ ID NO: 1925 - DNA, 22 bp, Glycine max
  source 1..22: mol_type = genomic DNA
tgatgcgtgttcgcttccggca

SEQ ID NO: 1926 - DNA, 22 bp, Glycine max
  source 1..22: mol_type = genomic DNA
tgattcttcatcgcggacgact

SEQ ID NO: 1927 - DNA, 22 bp, Glycine max
  source 1..22: mol_type = genomic DNA
agactcttaatcgcctacgcca

SEQ ID NO: 1928 - DNA, 22 bp, Glycine max
  source 1..22: mol_type = genomic DNA
agaatcgtcatcgtttccccca

SEQ ID NO: 1929 - DNA, 22 bp, Glycine max
  source 1..22: mol_type = genomic DNA
agatccttactcgcttacgcca

SEQ ID NO: 1930 - DNA, 22 bp, Glycine max
  source 1..22: mol_type = genomic DNA
agattcatcatcgctcacgctc

SEQ ID NO: 1931 - DNA, 22 bp, Glycine max
  source 1..22: mol_type = genomic DNA
tgctacgtcatcactcacgtca

SEQ ID NO: 1932 - DNA, 22 bp, Glycine max
  source 1..22: mol_type = genomic DNA
tgactcgtcatcgcaaacgtta

SEQ ID NO: 1933 - DNA, 22 bp, Glycine max
  source 1..22: mol_type = genomic DNA
tgattcatcactgctatcgcca

SEQ ID NO: 1934 - DNA, 22 bp, Glycine max
  source 1..22: mol_type = genomic DNA
tgattcgacaactcttacgtcc

SEQ ID NO: 1935 - DNA, 22 bp, Glycine max
  source 1..22: mol_type = genomic DNA
tggttcttcatcgcctccacca

SEQ ID NO: 1936 - DNA, 22 bp, Glycine max
  source 1..22: mol_type = genomic DNA
tgaatcgtcatccctttagcct

SEQ ID NO: 1937 - DNA, 22 bp, Glycine max
  source 1..22: mol_type = genomic DNA
tgcttcgtaaacgcttttgcca

SEQ ID NO: 1938 - DNA, 22 bp, Glycine max
  source 1..22: mol_type = genomic DNA
tgacacttcatcgcttgctcca

SEQ ID NO: 1939 - DNA, 22 bp, Glycine max
  source 1..22: mol_type = genomic DNA
agaatcgtcattgttttcgcca

SEQ ID NO: 1940 - DNA, 22 bp, Glycine max
  source 1..22: mol_type = genomic DNA
tgagtggccattgcttacgcct

SEQ ID NO: 1941 - DNA, 22 bp, Glycine max
  source 1..22: mol_type = genomic DNA
tgatttgtcattgccaccgcca

SEQ ID NO: 1942 - DNA, 22 bp, Glycine max
  source 1..22: mol_type = genomic DNA
tgcttcgcgatcgcttctgcca

SEQ ID NO: 1943 - DNA, 22 bp, Glycine max
  source 1..22: mol_type = genomic DNA
tgattaggcatcacatacacca

SEQ ID NO: 1944 - DNA, 22 bp, Glycine max
  source 1..22: mol_type = genomic DNA
agattagtcatcactgaagcca

SEQ ID NO: 1945 - DNA, 22 bp, Glycine max
  source 1..22: mol_type = genomic DNA
tgagtcaaaatcgcttacgcaa

SEQ ID NO: 1946 - DNA, 22 bp, Glycine max
  source 1..22: mol_type = genomic DNA
tgattcagcatcactaacgaca

SEQ ID NO: 1947 - DNA, 22 bp, Glycine max
  source 1..22: mol_type = genomic DNA
tgacttttcatcgctttcgccg

SEQ ID NO: 1948 - DNA, 22 bp, Glycine max
  source 1..22: mol_type = genomic DNA
tgatacgtcatcgattgagcaa

SEQ ID NO: 1949 - DNA, 22 bp, Sorghum bicolor
  source 1..22: mol_type = genomic DNA
tgattcgtcatcgatgccgccg

SEQ ID NO: 1950 - DNA, 22 bp, Sorghum bicolor
  source 1..22: mol_type = genomic DNA
tgatttgtcatagctttcgaca

SEQ ID NO: 1951 - DNA, 22 bp, Sorghum bicolor
  source 1..22: mol_type = genomic DNA
tgattcgtctttgtttatgcca

SEQ ID NO: 1952 - DNA, 22 bp, Sorghum bicolor
  source 1..22: mol_type = genomic DNA
tgattcgtcatgggttaggcta

SEQ ID NO: 1953 - DNA, 22 bp, Sorghum bicolor
  source 1..22: mol_type = genomic DNA
tgattcatcatttcttaagcca

SEQ ID NO: 1954 - DNA, 22 bp, Sorghum bicolor
  source 1..22: mol_type = genomic DNA
agtgtcgtcgtcgctgacgcca

SEQ ID NO: 1955 - DNA, 22 bp, Sorghum bicolor
  source 1..22: mol_type = genomic DNA
tgggtcgtcgtcgctgacgccc

SEQ ID NO: 1956 - DNA, 22 bp, Sorghum bicolor
  source 1..22: mol_type = genomic DNA
agcatcgtcaccgcgtacgcca

SEQ ID NO: 1957 - DNA, 22 bp, Sorghum bicolor
  source 1..22: mol_type = genomic DNA
tgattcgtccacgccagcgcca

SEQ ID NO: 1958 - DNA, 22 bp, Sorghum bicolor
  source 1..22: mol_type = genomic DNA
tgggtcgccatcgccgacgcca

SEQ ID NO: 1959 - DNA, 22 bp, Sorghum bicolor
  source 1..22: mol_type = genomic DNA
ggattcgtcgtcgccgccgcca

SEQ ID NO: 1960 - DNA, 22 bp, Sorghum bicolor
  source 1..22: mol_type = genomic DNA
tgctacgtcgtcgcgtacgcct

SEQ ID NO: 1961 - DNA, 22 bp, Sorghum bicolor
  source 1..22: mol_type = genomic DNA
tggctcgtcaccgccgacgcca

SEQ ID NO: 1962 - DNA, 22 bp, Sorghum bicolor
  source 1..22: mol_type = genomic DNA
tgcatcgtcatcgcgctcgcca

SEQ ID NO: 1963 - DNA, 22 bp, Sorghum bicolor
  source 1..22: mol_type = genomic DNA
ggattcgccttcgcctacgccg

SEQ ID NO: 1964 - DNA, 22 bp, Sorghum bicolor
  source 1..22: mol_type = genomic DNA
agatccgtcatcgcccacgccc

SEQ ID NO: 1965 - DNA, 22 bp, Sorghum bicolor
  source 1..22: mol_type = genomic DNA
tggttcgccttcgcctgcgcca

SEQ ID NO: 1966 - DNA, 22 bp, Sorghum bicolor
  source 1..22: mol_type = genomic DNA
tgatccgtcatcgcccccgccg

SEQ ID NO: 1967 - DNA, 22 bp, Sorghum bicolor
  source 1..22: mol_type = genomic DNA
cgcttcgtcaccgccttcgcca

SEQ ID NO: 1968 - DNA, 22 bp, Sorghum bicolor
  source 1..22: mol_type = genomic DNA
tgcttcgccttcgccttcgcca

SEQ ID NO: 1969 - DNA, 22 bp, Sorghum bicolor
  source 1..22: mol_type = genomic DNA
cgatacgtgatcgcggacgcca

SEQ ID NO: 1970 - DNA, 22 bp, Sorghum bicolor
  source 1..22: mol_type = genomic DNA
tgaaacgtcgtcgtatacgcca

SEQ ID NO: 1971 - DNA, 22 bp, Sorghum bicolor
  source 1..22: mol_type = genomic DNA
tagttcgtcgtcgctgccgcca

SEQ ID NO: 1972 - DNA, 22 bp, Sorghum bicolor
  source 1..22: mol_type = genomic DNA
tgatgagtcaccgccaacgcca

SEQ ID NO: 1973 - DNA, 22 bp, Sorghum bicolor
  source 1..22: mol_type = genomic DNA
tgaatcgtcatcaccgacgccc

SEQ ID NO: 1974 - DNA, 22 bp, Sorghum bicolor
  source 1..22: mol_type = genomic DNA
tgatgcgtcagcgcgtgcgtca

SEQ ID NO: 1975 - DNA, 22 bp, Sorghum bicolor
  source 1..22: mol_type = genomic DNA
tgatccgagatcgccgacgcca

SEQ ID NO: 1976 - DNA, 22 bp, Sorghum bicolor
  source 1..22: mol_type = genomic DNA
tgatccgtcgtcccatgcgcca

SEQ ID NO: 1977 - DNA, 22 bp, Sorghum bicolor
  source 1..22: mol_type = genomic DNA
tggtgcatcaccgcttccgcca

SEQ ID NO: 1978 - DNA, 22 bp, Sorghum bicolor
  source 1..22: mol_type = genomic DNA
tggtgccccatcgcgtacgcca

SEQ ID NO: 1979 - DNA, 22 bp, Sorghum bicolor
  source 1..22: mol_type = genomic DNA
ctgttcgtcaacgcgtacgcca

SEQ ID NO: 1980 - DNA, 22 bp, Sorghum bicolor
  source 1..22: mol_type = genomic DNA
tgagtcgtcgtcggctccgcca

SEQ ID NO: 1981 - DNA, 22 bp, Sorghum bicolor
  source 1..22: mol_type = genomic DNA
tgcttcttcaacgcggacgcca

SEQ ID NO: 1982 - DNA, 22 bp, Sorghum bicolor
  source 1..22: mol_type = genomic DNA
tggagcgtcctcgcttacgcta

SEQ ID NO: 1983 - DNA, 22 bp, Sorghum bicolor
  source 1..22: mol_type = genomic DNA
tgtgtcgtcatcggatacgccc

SEQ ID NO: 1984 - DNA, 22 bp, Sorghum bicolor
  source 1..22: mol_type = genomic DNA
tgatccaccatcgctaccgcca

SEQ ID NO: 1985 - DNA, 22 bp, Sorghum bicolor
  source 1..22: mol_type = genomic DNA
tgggtcgtcatcgttatcgcca

SEQ ID NO: 1986 - DNA, 22 bp, Sorghum bicolor
  source 1..22: mol_type = genomic DNA
cgactcgtcaccgctgacgcga

SEQ ID NO: 1987 - DNA, 22 bp, Sorghum bicolor
  source 1..22: mol_type = genomic DNA
gccgtcgtcatcgcctacgcca

SEQ ID NO: 1988 - DNA, 22 bp, Sorghum bicolor
  source 1..22: mol_type = genomic DNA
tgcttcgtactcgctgccgcca

SEQ ID NO: 1989 - DNA, 22 bp, Sorghum bicolor
  source 1..22: mol_type = genomic DNA
tgatccgtcaacgctaatgcct

SEQ ID NO: 1990 - DNA, 22 bp, Sorghum bicolor
  source 1..22: mol_type = genomic DNA
tgatttgacatcgcactcgcca

SEQ ID NO: 1991 - DNA, 22 bp, Sorghum bicolor
  source 1..22: mol_type = genomic DNA
ggcttcgtcatctccgacgcca

SEQ ID NO: 1992 - DNA, 22 bp, Sorghum bicolor
  source 1..22: mol_type = genomic DNA
ggcttcgtcctagctttcgcca

SEQ ID NO: 1993 - DNA, 22 bp, Sorghum bicolor
  source 1..22: mol_type = genomic DNA
tgcttcgccatcgctgacgcgt

SEQ ID NO: 1994 - DNA, 22 bp, Sorghum bicolor
  source 1..22: mol_type = genomic DNA
tgatttggcatcgccgtcgcca

SEQ ID NO: 1995 - DNA, 22 bp, Sorghum bicolor
  source 1..22: mol_type = genomic DNA
tgccacgtcatcgcttccccca

SEQ ID NO: 1996 - DNA, 22 bp, Sorghum bicolor
  source 1..22: mol_type = genomic DNA
tgatttgtcaccgccgccgcca

SEQ ID NO: 1997 - DNA, 22 bp, Sorghum bicolor
  source 1..22: mol_type = genomic DNA
tggttcgtcatcgtccccgcca

SEQ ID NO: 1998 - DNA, 22 bp, Sorghum bicolor
  source 1..22: mol_type = genomic DNA
tgatccgtcgtcgttctcgcca

SEQ ID NO: 1999 - DNA, 22 bp, Sorghum bicolor
  source 1..22: mol_type = genomic DNA
tgattcctcttcgctctcgccg

SEQ ID NO: 2000 - DNA, 22 bp, Sorghum bicolor
  source 1..22: mol_type = genomic DNA
tgcttcgtcgtcgcctacgtct

SEQ ID NO: 2001 - DNA, 22 bp, Sorghum bicolor
  source 1..22: mol_type = genomic DNA
tgatacatcagagctaacgcca

SEQ ID NO: 2002 - DNA, 22 bp, Sorghum bicolor
  source 1..22: mol_type = genomic DNA
tccttcgtcttcgcccacgcca

SEQ ID NO: 2003 - DNA, 22 bp, Sorghum bicolor
  source 1..22: mol_type = genomic DNA
taattcgtcatcgcgaacgacg

SEQ ID NO: 2004 - DNA, 22 bp, Sorghum bicolor
  source 1..22: mol_type = genomic DNA
tgggtggtcatcgctgacgcaa

SEQ ID NO: 2005 - DNA, 22 bp, Sorghum bicolor
  source 1..22: mol_type = genomic DNA
taattcaacatcgcatccgcca

SEQ ID NO: 2006 - DNA, 22 bp, Sorghum bicolor
  source 1..22: mol_type = genomic DNA
tgataggtcaacccttgcgcca

SEQ ID NO: 2007 - DNA, 22 bp, Sorghum bicolor
  source 1..22: mol_type = genomic DNA
tgagtcatcagtgcttgcgcca

SEQ ID NO: 2008 - DNA, 22 bp, Sorghum bicolor
  source 1..22: mol_type = genomic DNA
tcgttagccatcgctaacgcca

SEQ ID NO: 2009 - DNA, 22 bp, Sorghum bicolor
  source 1..22: mol_type = genomic DNA
tcgttagccatcgctgacgcca

SEQ ID NO: 2010 - DNA, 22 bp, Sorghum bicolor
  source 1..22: mol_type = genomic DNA
tgattcgtcctagctatcacca

SEQ ID NO: 2011 - DNA, 22 bp, Sorghum bicolor
  source 1..22: mol_type = genomic DNA
gcattcgtcgtcgcttacgcac

SEQ ID NO: 2012 - DNA, 22 bp, Sorghum bicolor
  source 1..22: mol_type = genomic DNA
tgattcgtcctagctgtcacca

SEQ ID NO: 2013 - DNA, 22 bp, Sorghum bicolor
  source 1..22: mol_type = genomic DNA
ggatcagtgatcgctttcgcca

SEQ ID NO: 2014 - DNA, 22 bp, Sorghum bicolor
  source 1..22: mol_type = genomic DNA
tgactcgtcagctcttgcacca

SEQ ID NO: 2015 - DNA, 22 bp, Sorghum bicolor
  source 1..22: mol_type = genomic DNA
tgaatcttcttggcgtacgcca

SEQ ID NO: 2016 - DNA, 22 bp, Sorghum bicolor
  source 1..22: mol_type = genomic DNA
tgatccgtcaactgctacgcca

SEQ ID NO: 2017 - DNA, 22 bp, Sorghum bicolor
  source 1..22: mol_type = genomic DNA
tgattcgtgagcgcttttgccg

SEQ ID NO: 2018 - DNA, 22 bp, Sorghum bicolor
  source 1..22: mol_type = genomic DNA
tggttcgtcattgctgacgctg

SEQ ID NO: 2019 - DNA, 22 bp, Sorghum bicolor
  source 1..22: mol_type = genomic DNA
tgaatcgctatcgctttcggca

SEQ ID NO: 2020 - DNA, 22 bp, Sorghum bicolor
  source 1..22: mol_type = genomic DNA
tgagacgtcctttcttacgcca

SEQ ID NO: 2021 - DNA, 22 bp, Sorghum bicolor
  source 1..22: mol_type = genomic DNA
tccttcgtcatcgccaacccca

SEQ ID NO: 2022 - DNA, 22 bp, Sorghum bicolor
  source 1..22: mol_type = genomic DNA
tgttttgtcctcgctgaagcca

SEQ ID NO: 2023 - DNA, 22 bp, Sorghum bicolor
  source 1..22: mol_type = genomic DNA
tggttcatcttcgcttcctcca

SEQ ID NO: 2024 - DNA, 22 bp, Sorghum bicolor
  source 1..22: mol_type = genomic DNA
cgattcgccatcgttcaagcca

SEQ ID NO: 2025 - DNA, 22 bp, Sorghum bicolor
  source 1..22: mol_type = genomic DNA
tccttcgtcaccgcctacggca

SEQ ID NO: 2026 - DNA, 22 bp, Sorghum bicolor
  source 1..22: mol_type = genomic DNA
tgatacgttgtcgcttacgctt

SEQ ID NO: 2027 - DNA, 22 bp, Sorghum bicolor
  source 1..22: mol_type = genomic DNA
tgactcttcatcaccttcgcca

SEQ ID NO: 2028 - DNA, 22 bp, Sorghum bicolor
  source 1..22: mol_type = genomic DNA
ttcttcgtcgtcccttccgcca

SEQ ID NO: 2029 - DNA, 22 bp, Sorghum bicolor
  source 1..22: mol_type = genomic DNA
tctctcgtcatcggtttcgcca

SEQ ID NO: 2030 - DNA, 22 bp, Sorghum bicolor
  source 1..22: mol_type = genomic DNA
tgagtcgtcatccctttctccc

SEQ ID NO: 2031 - DNA, 22 bp, Sorghum bicolor
  source 1..22: mol_type = genomic DNA
tgattcgtcatcgccttcgtat

SEQ ID NO: 2032 - DNA, 22 bp, Sorghum bicolor
  source 1..22: mol_type = genomic DNA
tgttgctttatcgcctacgcca

SEQ ID NO: 2033 - DNA, 22 bp, Sorghum bicolor
  source 1..22: mol_type = genomic DNA
tgcgtcgtcatcgcttttgtca

SEQ ID NO: 2034 - DNA, 22 bp, Sorghum bicolor
  source 1..22: mol_type = genomic DNA
tgaatcgtcatcgagtacagca

SEQ ID NO: 2035 - DNA, 22 bp, Sorghum bicolor
  source 1..22: mol_type = genomic DNA
tgcttcgtcatcgtccatgcca

SEQ ID NO: 2036 - DNA, 22 bp, Sorghum bicolor
  source 1..22: mol_type = genomic DNA
tgcttcctcttcgcttcctcca

SEQ ID NO: 2037 - DNA, 22 bp, Sorghum bicolor
  source 1..22: mol_type = genomic DNA
agattcatcatcgcttaagcac

SEQ ID NO: 2038 - DNA, 22 bp, Sorghum bicolor
  source 1..22: mol_type = genomic DNA
ttcttcgtcatcgctttcccct

SEQ ID NO: 2039 - DNA, 22 bp, Sorghum bicolor
  source 1..22: mol_type = genomic DNA
taagtcgtcattgcatacgaca

SEQ ID NO: 2040 - DNA, 22 bp, Sorghum bicolor
  source 1..22: mol_type = genomic DNA
tacttcgtcatggagtacgcca

SEQ ID NO: 2041 - DNA, 22 bp, Sorghum bicolor
  source 1..22: mol_type = genomic DNA
tgattagtcaaggttgacgcca

SEQ ID NO: 2042 - DNA, 22 bp, Sorghum bicolor
  source 1..22: mol_type = genomic DNA
tgattcatcgtcacttaggcct

SEQ ID NO: 2043 - DNA, 22 bp, Sorghum bicolor
  source 1..22: mol_type = genomic DNA
tgattccaaatcgctcaagcca

SEQ ID NO: 2044 - DNA, 23 bp, Brassica napus
  source 1..23: mol_type = genomic DNA
aaaagaagtcagcactaacgaca

SEQ ID NO: 2045 - DNA, 23 bp, Brassica napus
  source 1..23: mol_type = genomic DNA
acatgacgtatgcattgacgaca

SEQ ID NO: 2046 - DNA, 23 bp, Brassica napus
  source 1..23: mol_type = genomic DNA
agaaaacgaaagcactgaagaca

SEQ ID NO: 2047 - DNA, 23 bp, Brassica napus
  source 1..23: mol_type = genomic DNA
agaagaagaaagcacagacgacc

SEQ ID NO: 2048 - DNA, 23 bp, Brassica napus
  source 1..23: mol_type = genomic DNA
agaagaagcaagcacagacaaca

SEQ ID NO: 2049 - DNA, 23 bp, Brassica napus
  source 1..23: mol_type = genomic DNA
agaagacataaacactgtcgact

SEQ ID NO: 2050 - DNA, 23 bp, Brassica napus
  source 1..23: mol_type = genomic DNA
agatgacgtaagcaatgacaaca

SEQ ID NO: 2051 - DNA, 23 bp, Brassica napus
  source 1..23: mol_type = genomic DNA
agatgacgtatgcactgaggtca

SEQ ID NO: 2052 - DNA, 23 bp, Brassica napus
  source 1..23: mol_type = genomic DNA
agatgacgtatgcactgatgtca

SEQ ID NO: 2053 - DNA, 23 bp, Brassica napus
  source 1..23: mol_type = genomic DNA
caatgacgtaagcaatgacgaaa

SEQ ID NO: 2054 - DNA, 23 bp, Brassica napus
  source 1..23: mol_type = genomic DNA
cgaagaagtaagcagtgaggaca

SEQ ID NO: 2055 - DNA, 23 bp, Brassica napus
  source 1..23: mol_type = genomic DNA
cgaagacgtaaacaatgttgaca

SEQ ID NO: 2056 - DNA, 23 bp, Brassica napus
  source 1..23: mol_type = genomic DNA
cgaagacgtaagcagcgacgcct

SEQ ID NO: 2057 - DNA, 23 bp, Brassica napus
  source 1..23: mol_type = genomic DNA
cgaagacgtagccactgatcaca

SEQ ID NO: 2058 - DNA, 23 bp, Brassica napus
  source 1..23: mol_type = genomic DNA
cgaagatgtacccactgaccaca

SEQ ID NO: 2059 - DNA, 23 bp, Brassica napus
  source 1..23: mol_type = genomic DNA
cgaagccgtaaccactgacgacg

SEQ ID NO: 2060 - DNA, 23 bp, Brassica napus
  source 1..23: mol_type = genomic DNA
gaaaaacgtaagcagtgacaaca

SEQ ID NO: 2061 - DNA, 23 bp, Brassica napus
  source 1..23: mol_type = genomic DNA
ggaagacggaaacagtgacgacg

SEQ ID NO: 2062 - DNA, 23 bp, Brassica napus
  source 1..23: mol_type = genomic DNA
taaagacgtcagcaccgacgaaa

SEQ ID NO: 2063 - DNA, 23 bp, Brassica napus
  source 1..23: mol_type = genomic DNA
taatgacgtagggactgacgcca

SEQ ID NO: 2064 - DNA, 23 bp, Brassica napus
  source 1..23: mol_type = genomic DNA
taatgacgtatgcacagacggca

SEQ ID NO: 2065 - DNA, 23 bp, Brassica napus
  source 1..23: mol_type = genomic DNA
tcaaaccggaagcactgatgaca

SEQ ID NO: 2066 - DNA, 23 bp, Brassica napus
  source 1..23: mol_type = genomic DNA
tcaagacgaaagcaatgacgtcg

SEQ ID NO: 2067 - DNA, 23 bp, Brassica napus
  source 1..23: mol_type = genomic DNA
tcaagacgtttgcactgccgaga

SEQ ID NO: 2068 - DNA, 23 bp, Brassica napus
  source 1..23: mol_type = genomic DNA
tcaagtcgaaagcactgaggaga

SEQ ID NO: 2069 - DNA, 23 bp, Brassica napus
  source 1..23: mol_type = genomic DNA
tcatgacgtatgcattgacgtca

SEQ ID NO: 2070 - DNA, 23 bp, Brassica napus
  source 1..23: mol_type = genomic DNA
tgaaatcgcacacactgacgaca

SEQ ID NO: 2071 - DNA, 23 bp, Brassica napus
  source 1..23: mol_type = genomic DNA
tgaacacgttaacactgtcgata

SEQ ID NO: 2072 - DNA, 23 bp, Brassica napus
  source 1..23: mol_type = genomic DNA
tgaacaggtatacacagacgaca

SEQ ID NO: 2073 - DNA, 23 bp, Brassica napus
  source 1..23: mol_type = genomic DNA
tgaagaaatacacactgacgacc

SEQ ID NO: 2074 - DNA, 23 bp, Brassica napus
  source 1..23: mol_type = genomic DNA
tgaagaagaaagcagtgaagaaa

SEQ ID NO: 2075 - DNA, 23 bp, Brassica napus
  source 1..23: mol_type = genomic DNA
tgaagaagcaagcacagacttca

SEQ ID NO: 2076 - DNA, 23 bp, Brassica napus
  source 1..23: mol_type = genomic DNA
tgaagaaggaagaaccgacgacg

SEQ ID NO: 2077 - DNA, 23 bp, Brassica napus
  source 1..23: mol_type = genomic DNA
tgaagaaggaggcactgaagacc

SEQ ID NO: 2078 - DNA, 23 bp, Brassica napus
  source 1..23: mol_type = genomic DNA
tgaagaagtatgcagtgaagcca

SEQ ID NO: 2079 - DNA, 23 bp, Brassica napus
  source 1..23: mol_type = genomic DNA
tgaagaagtcatcgctggcgaca

SEQ ID NO: 2080 - DNA, 23 bp, Brassica napus
  source 1..23: mol_type = genomic DNA
tgaagacatcagcacttacgatc

SEQ ID NO: 2081 - DNA, 23 bp, Brassica napus
  source 1..23: mol_type = genomic DNA
tgaagacccaagcaacgaggaca

SEQ ID NO: 2082 - DNA, 23 bp, Brassica napus
  source 1..23: mol_type = genomic DNA
tgaagacctgagctccgacgtca

SEQ ID NO: 2083 - DNA, 23 bp, Brassica napus
  source 1..23: mol_type = genomic DNA
tgaagacgactacactgacgacg

SEQ ID NO: 2084 - DNA, 23 bp, Brassica napus
  source 1..23: mol_type = genomic DNA
tgaagacgtaaaccttcacggca

SEQ ID NO: 2085 - DNA, 23 bp, Brassica napus
  source 1..23: mol_type = genomic DNA
tgaagacgtaagctctgattcaa

SEQ ID NO: 2086 - DNA, 23 bp, Brassica napus
  source 1..23: mol_type = genomic DNA
tgaagacgtaattgctgacgaat

SEQ ID NO: 2087 - DNA, 23 bp, Brassica napus
  source 1..23: mol_type = genomic DNA
tgaagacgtacgaactggagcca

SEQ ID NO: 2088 - DNA, 23 bp, Brassica napus
  source 1..23: mol_type = genomic DNA
tgaagacgtacgcactcacccaa

SEQ ID NO: 2089 - DNA, 23 bp, Brassica napus
  source 1..23: mol_type = genomic DNA
tgaagacgtagtcaccgaccaaa

SEQ ID NO: 2090 - DNA, 23 bp, Brassica napus
  source 1..23: mol_type = genomic DNA
tgaagacgttaacgctgaccaga

SEQ ID NO: 2091 - DNA, 23 bp, Brassica napus
  source 1..23: mol_type = genomic DNA
tgaagacgttagcaccgacaaag

SEQ ID NO: 2092 - DNA, 23 bp, Brassica napus
  source 1..23: mol_type = genomic DNA
tgaagacgttggctcagacgacg

SEQ ID NO: 2093 - DNA, 23 bp, Brassica napus
  source 1..23: mol_type = genomic DNA
tgaagacttaccccgtgacgaca

SEQ ID NO: 2094 - DNA, 23 bp, Brassica napus
  source 1..23: mol_type = genomic DNA
tgaagacttagccgctgaccaca

SEQ ID NO: 2095 - DNA, 23 bp, Brassica napus
  source 1..23: mol_type = genomic DNA
tgaagaggcaaacactgaagaca

SEQ ID NO: 2096 - DNA, 23 bp, Brassica napus
  source 1..23: mol_type = genomic DNA
tgaagatataaacacttacgaca

SEQ ID NO: 2097 - DNA, 23 bp, Brassica napus
  source 1..23: mol_type = genomic DNA
tgaagatgctagcagtgacaaca

SEQ ID NO: 2098 - DNA, 23 bp, Brassica napus
  source 1..23: mol_type = genomic DNA
tgaagccatcagcactgtcaaca

SEQ ID NO: 2099 - DNA, 23 bp, Brassica napus
  source 1..23: mol_type = genomic DNA
tgaagccgcaagcagagacgacg

SEQ ID NO: 2100 - DNA, 23 bp, Brassica napus
  source 1..23: mol_type = genomic DNA
tgaagccgtagccgctgaccaca

SEQ ID NO: 2101 - DNA, 23 bp, Brassica napus
  source 1..23: mol_type = genomic DNA
tgaagcggaaagctttgacgaca

SEQ ID NO: 2102 - DNA, 23 bp, Brassica napus
  source 1..23: mol_type = genomic DNA
tgaaggagtaaaccctgacgact

SEQ ID NO: 2103 - DNA, 23 bp, Brassica napus
  source 1..23: mol_type = genomic DNA
tgaaggagtaagccctgaggact

SEQ ID NO: 2104 - DNA, 23 bp, Brassica napus
  source 1..23: mol_type = genomic DNA
tgaagtcattagcacagtcgaca

SEQ ID NO: 2105 - DNA, 23 bp, Brassica napus
  source 1..23: mol_type = genomic DNA
tgaagtcgaaagcactgaggaga

SEQ ID NO: 2106 - DNA, 23 bp, Brassica napus
  source 1..23: mol_type = genomic DNA
tgaagtcgtagccacagaccaca

SEQ ID NO: 2107 - DNA, 23 bp, Brassica napus
  source 1..23: mol_type = genomic DNA
tgaagttctgagcactggcgaca

SEQ ID NO: 2108 - DNA, 23 bp, Brassica napus
  source 1..23: mol_type = genomic DNA
tgaatacttcagcactggcgacg

SEQ ID NO: 2109 - DNA, 23 bp, Brassica napus
  source 1..23: mol_type = genomic DNA
tgaatactttagcactggcgacg

SEQ ID NO: 2110 - DNA, 23 bp, Brassica napus
  source 1..23: mol_type = genomic DNA
tgaccgcggaagcacttacgaca

SEQ ID NO: 2111 - DNA, 23 bp, Brassica napus
  source 1..23: mol_type = genomic DNA
tgacgacgaaagcaatcacaaca

SEQ ID NO: 2112 - DNA, 23 bp, Brassica napus
  source 1..23: mol_type = genomic DNA
tgacgccggaagcagagacgaca

SEQ ID NO: 2113 - DNA, 23 bp, Brassica napus
  source 1..23: mol_type = genomic DNA
tgatgaccttagcactgatgaaa

SEQ ID NO: 2114 - DNA, 23 bp, Brassica napus
  source 1..23: mol_type = genomic DNA
tggacactaaaacactgacgaca

SEQ ID NO: 2115 - DNA, 23 bp, Brassica napus
  source 1..23: mol_type = genomic DNA
tggagaagtaagcactgaagaag

SEQ ID NO: 2116 - DNA, 23 bp, Brassica napus
  source 1..23: mol_type = genomic DNA
tggagacggaagcagtgaggacc

SEQ ID NO: 2117 - DNA, 23 bp, Brassica napus
  source 1..23: mol_type = genomic DNA
tggagccgaaagctttgacgaca

SEQ ID NO: 2118 - DNA, 23 bp, Brassica napus
  source 1..23: mol_type = genomic DNA
tgtagactgaagcactgacacca

SEQ ID NO: 2119 - DNA, 23 bp, Brassica napus
  source 1..23: mol_type = genomic DNA
ttaagacgtcagcacagacaaga

SEQ ID NO: 2120 - DNA, 23 bp, Zea mays
  source 1..23: mol_type = genomic DNA
agaagaggaaagcactgatgaca

SEQ ID NO: 2121 - DNA, 23 bp, Zea mays
  source 1..23: mol_type = genomic DNA
tgaagaagtaagctctgaaggca

SEQ ID NO: 2122 - DNA, 23 bp, Zea mays
  source 1..23: mol_type = genomic DNA
tgaagacctcagcacaggcgaca

SEQ ID NO: 2123 - DNA, 23 bp, Zea mays
  source 1..23: mol_type = genomic DNA
tgaagacgagagcactcactaca

SEQ ID NO: 2124 - DNA, 23 bp, Zea mays
  source 1..23: mol_type = genomic DNA
tgaagacgtaagcactgacgaca

SEQ ID NO: 2125 - DNA, 23 bp, Zea mays
  source 1..23: mol_type = genomic DNA
tgaagacgtaagggctgacgtga

SEQ ID NO: 2126 - DNA, 23 bp, Zea mays
  source 1..23: mol_type = genomic DNA
tgaagacgtcaacaccgacgcca

SEQ ID NO: 2127 - DNA, 23 bp, Zea mays
  source 1..23: mol_type = genomic DNA
tgaagacgtcaacaccgacgtca

SEQ ID NO: 2128 - DNA, 23 bp, Zea mays
  source 1..23: mol_type = genomic DNA
tgaagacgtcaacactgacgcca

SEQ ID NO: 2129 - DNA, 23 bp, Zea mays
  source 1..23: mol_type = genomic DNA
tgaagacgtcaacactgatgaca

SEQ ID NO: 2130 - DNA, 23 bp, Zea mays
  source 1..23: mol_type = genomic DNA
tgaagacgtcaacactgatgcca

SEQ ID NO: 2131 - DNA, 23 bp, Zea mays
  source 1..23: mol_type = genomic DNA
tgaagacgtcatcaccgacgcca

SEQ ID NO: 2132 - DNA, 23 bp, Zea mays
  source 1..23: mol_type = genomic DNA
tgaagacgttagcaaagtcgaca

SEQ ID NO: 2133 - DNA, 23 bp, Zea mays
  source 1..23: mol_type = genomic DNA
tgaagacttaagctcaaacgaca

SEQ ID NO: 2134 - DNA, 23 bp, Zea mays
  source 1..23: mol_type = genomic DNA
tgaagatgtaaacaccgacgcca

SEQ ID NO: 2135 - DNA, 23 bp, Zea mays
  source 1..23: mol_type = genomic DNA
tgaagatgtcaacaccgacgaca

SEQ ID NO: 2136 - DNA, 23 bp, Zea mays
  source 1..23: mol_type = genomic DNA
tgaagatgtcaacactgacgcca

SEQ ID NO: 2137 - DNA, 23 bp, Zea mays
  source 1..23: mol_type = genomic DNA
tgaagatgtcagcaccgacgcca

SEQ ID NO: 2138 - DNA, 23 bp, Zea mays
  source 1..23: mol_type = genomic DNA
tgatgacgtcagcacagacgcca

SEQ ID NO: 2139 - DNA, 23 bp, Oryza sativa
  source 1..23: mol_type = genomic DNA
agatgacgtcaccactgacgtca

SEQ ID NO: 2140 - DNA, 23 bp, Oryza sativa
  source 1..23: mol_type = genomic DNA
cgatgacgtaaccgctgacgtca

SEQ ID NO: 2141 - DNA, 23 bp, Oryza sativa
  source 1..23: mol_type = genomic DNA
cgatgacgtcagcaatgacgtca

SEQ ID NO: 2142 - DNA, 23 bp, Oryza sativa
  source 1..23: mol_type = genomic DNA
cgatgacgtcagcaccggcgaca

SEQ ID NO: 2143 - DNA, 23 bp, Oryza sativa
  source 1..23: mol_type = genomic DNA
cgatgacgtcagcagtgacgtca

SEQ ID NO: 2144 - DNA, 23 bp, Oryza sativa
  source 1..23: mol_type = genomic DNA
cgatgacgtcagcgatgacgaca

SEQ ID NO: 2145 - DNA, 23 bp, Oryza sativa
  source 1..23: mol_type = genomic DNA
cgatgacgttagcgatgacgaca

SEQ ID NO: 2146 - DNA, 23 bp, Oryza sativa
  source 1..23: mol_type = genomic DNA
ggaagaagatagcactgacgcca

SEQ ID NO: 2147 - DNA, 23 bp, Oryza sativa
  source 1..23: mol_type = genomic DNA
ggaagacgaaagcagtgacgaca

SEQ ID NO: 2148 - DNA, 23 bp, Oryza sativa
  source 1..23: mol_type = genomic DNA
ggaagacggtagcaacgacgaca

SEQ ID NO: 2149 - DNA, 23 bp, Oryza sativa
  source 1..23: mol_type = genomic DNA
ggacgacctaagctctgtcgaca

SEQ ID NO: 2150 - DNA, 23 bp, Oryza sativa
  source 1..23: mol_type = genomic DNA
tcaagacgtaagcactgcccaaa

SEQ ID NO: 2151 - DNA, 23 bp, Oryza sativa
  source 1..23: mol_type = genomic DNA
tgaagaagaaagccctgtcgcca

SEQ ID NO: 2152 - DNA, 23 bp, Oryza sativa
  source 1..23: mol_type = genomic DNA
tgaagacgagagcaatgacgaca

SEQ ID NO: 2153 - DNA, 23 bp, Oryza sativa
  source 1..23: mol_type = genomic DNA
tgaagacgagagcgacgacgaca

SEQ ID NO: 2154 - DNA, 23 bp, Oryza sativa
  source 1..23: mol_type = genomic DNA
tgaagacgagagcgatgacgacg

SEQ ID NO: 2155 - DNA, 23 bp, Oryza sativa
  source 1..23: mol_type = genomic DNA
tgacgacgtcaccgctgacgtca

SEQ ID NO: 2156 - DNA, 23 bp, Oryza sativa
  source 1..23: mol_type = genomic DNA
tgacgacgtcagcgatgacgtca

SEQ ID NO: 2157 - DNA, 23 bp, Oryza sativa
  source 1..23: mol_type = genomic DNA
tgacgacgtcaggactgacgccc

SEQ ID NO: 2158 - DNA, 23 bp, Oryza sativa
  source 1..23: mol_type = genomic DNA
tgaggacgtgcgcactgatgacg

SEQ ID NO: 2159 - DNA, 23 bp, Oryza sativa
  source 1..23: mol_type = genomic DNA
tgatgacgccagcaatgacgtca

SEQ ID NO: 2160 - DNA, 23 bp, Oryza sativa
  source 1..23: mol_type = genomic DNA
tgatgacgtcagcaatgacgtca

SEQ ID NO: 2161 - DNA, 23 bp, Oryza sativa
  source 1..23: mol_type = genomic DNA
tgatgacgtcagcagtgacgtca

SEQ ID NO: 2162 - DNA, 23 bp, Oryza sativa
  source 1..23: mol_type = genomic DNA
tgatgacgtcagcgatgacgtca

SEQ ID NO: 2163 - DNA, 23 bp, Oryza sativa
  source 1..23: mol_type = genomic DNA
tgatgacgtcagcggtgacgcca

SEQ ID NO: 2164 - DNA, 23 bp, Oryza sativa
  source 1..23: mol_type = genomic DNA
tgatgacgtcagcggtgacgtca

SEQ ID NO: 2165 - DNA, 23 bp, Oryza sativa
  source 1..23: mol_type = genomic DNA
tgatgacgtcggcaatgacgtca

SEQ ID NO: 2166 - DNA, 23 bp, Oryza sativa
  source 1..23: mol_type = genomic DNA
tgcagacggaaatactgacgaca

SEQ ID NO: 2167 - DNA, 23 bp, Oryza sativa
  source 1..23: mol_type = genomic DNA
tggagacgagagctctggcgaca

SEQ ID NO: 2168 - DNA, 23 bp, Glycine max
  source 1..23: mol_type = genomic DNA
agaagacgaaaacaacgacgaca

SEQ ID NO: 2169 - DNA, 23 bp, Glycine max
  source 1..23: mol_type = genomic DNA
agaagacgaaagcactaaaggca

SEQ ID NO: 2170 - DNA, 23 bp, Glycine max
  source 1..23: mol_type = genomic DNA
agaagaggcaagcactggagaca

SEQ ID NO: 2171 - DNA, 23 bp, Glycine max
  source 1..23: mol_type = genomic DNA
agaccacgttagcaatgacgaca

SEQ ID NO: 2172 - DNA, 23 bp, Glycine max
  source 1..23: mol_type = genomic DNA
cgaaggagatagcactgacgaca

SEQ ID NO: 2173 - DNA, 23 bp, Glycine max
  source 1..23: mol_type = genomic DNA
ggaagaagaaaccactgacgtca

SEQ ID NO: 2174 - DNA, 23 bp, Glycine max
  source 1..23: mol_type = genomic DNA
ggaagaagaaatcactgacgtca

SEQ ID NO: 2175 - DNA, 23 bp, Glycine max
  source 1..23: mol_type = genomic DNA
ggaagacgcaagaactgatgact

SEQ ID NO: 2176 - DNA, 23 bp, Glycine max
  source 1..23: mol_type = genomic DNA
ggaaggtattagcactgacgaca

SEQ ID NO: 2177 - DNA, 23 bp, Glycine max
  source 1..23: mol_type = genomic DNA
ggatcacgtacgcactgacgata

SEQ ID NO: 2178 - DNA, 23 bp, Glycine max
  source 1..23: mol_type = genomic DNA
ggatcacgtacgcactgatgaca

SEQ ID NO: 2179 - DNA, 23 bp, Glycine max
  source 1..23: mol_type = genomic DNA
ggatgacgtacgcactgatgata

SEQ ID NO: 2180 - DNA, 23 bp, Glycine max
  source 1..23: mol_type = genomic DNA
ggatgtcggaagaactgacgaca

SEQ ID NO: 2181 - DNA, 23 bp, Glycine max
  source 1..23: mol_type = genomic DNA
taaaggcgtaagcattaacgaca

SEQ ID NO: 2182 - DNA, 23 bp, Glycine max
  source 1..23: mol_type = genomic DNA
tcaaaacgtaagcactggcgtca

SEQ ID NO: 2183 - DNA, 23 bp, Glycine max
  source 1..23: mol_type = genomic DNA
tgaaaacagaagcactgaggaca

SEQ ID NO: 2184 - DNA, 23 bp, Glycine max
  source 1..23: mol_type = genomic DNA
tgaaaacagaagctctgaggaca

SEQ ID NO: 2185 - DNA, 23 bp, Glycine max
  source 1..23: mol_type = genomic DNA
tgaaaacataaggactgaggaca

SEQ ID NO: 2186 - DNA, 23 bp, Glycine max
  source 1..23: mol_type = genomic DNA
tgaaaacgaaagctctgacaaaa

SEQ ID NO: 2187 - DNA, 23 bp, Glycine max
  source 1..23: mol_type = genomic DNA
tgaaaacgaaagctctgaggaaa

SEQ ID NO: 2188 - DNA, 23 bp, Glycine max
  source 1..23: mol_type = genomic DNA
tgaaaacggaagcactgacaaaa

SEQ ID NO: 2189 - DNA, 23 bp, Glycine max
  source 1..23: mol_type = genomic DNA
tgaaaacggaagctctaaggaca

SEQ ID NO: 2190 - DNA, 23 bp, Glycine max
  source 1..23: mol_type = genomic DNA
tgaaaacggaagctctcacgcca

SEQ ID NO: 2191 - DNA, 23 bp, Glycine max
  source 1..23: mol_type = genomic DNA
tgaaaacggaagctctgaagaaa

SEQ ID NO: 2192 - DNA, 23 bp, Glycine max
  source 1..23: mol_type = genomic DNA
tgaaaacggaagctctgacaaaa

SEQ ID NO: 2193 - DNA, 23 bp, Glycine max
  source 1..23: mol_type = genomic DNA
tgaaaacggaagctctgacgtaa

SEQ ID NO: 2194 - DNA, 23 bp, Glycine max
  source 1..23: mol_type = genomic DNA
tgaaaacggaagctctgagaaca

SEQ ID NO: 2195 - DNA, 23 bp, Glycine max
  source 1..23: mol_type = genomic DNA
tgaaaacggaagctctgaggaaa

SEQ ID NO: 2196 - DNA, 23 bp, Glycine max
  source 1..23: mol_type = genomic DNA
tgaaaacgtaaagactgaagaca

SEQ ID NO: 2197 - DNA, 23 bp, Glycine max
  source 1..23: mol_type = genomic DNA
tgaaagcgtaaacactgaagaca

SEQ ID NO: 2198 - DNA, 23 bp, Glycine max
  source 1..23: mol_type = genomic DNA
tgaaagcgtaaggactgaagaca

SEQ ID NO: 2199 - DNA, 23 bp, Glycine max
  source 1..23: mol_type = genomic DNA
tgaagaactaaggaatgacgaca

SEQ ID NO: 2200 - DNA, 23 bp, Glycine max
  source 1..23: mol_type = genomic DNA
tgaagaagaagtcactgacgtca

SEQ ID NO: 2201 - DNA, 23 bp, Glycine max
  source 1..23: mol_type = genomic DNA
tgaagaagacagcaatgacgaca

SEQ ID NO: 2202 - DNA, 23 bp, Glycine max
  source 1..23: mol_type = genomic DNA
tgaagaagtagaatctgacgaca

SEQ ID NO: 2203 - DNA, 23 bp, Glycine max
  source 1..23: mol_type = genomic DNA
tgaagaagttttcaccgacgaca

SEQ ID NO: 2204 - DNA, 23 bp, Glycine max
  source 1..23: mol_type = genomic DNA
tgaagacagaggcactgaggaaa

SEQ ID NO: 2205 - DNA, 23 bp, Glycine max
  source 1..23: mol_type = genomic DNA
tgaagaccgaagaacgaacgaca

SEQ ID NO: 2206 - DNA, 23 bp, Glycine max
  source 1..23: mol_type = genomic DNA
tgaagaccgaagaacggacgaaa

SEQ ID NO: 2207 - DNA, 23 bp, Glycine max
  source 1..23: mol_type = genomic DNA
tgaagacgaacaaactgacgaaa

SEQ ID NO: 2208 - DNA, 23 bp, Glycine max
  source 1..23: mol_type = genomic DNA
tgaagacgacaacactgaagcca

SEQ ID NO: 2209 - DNA, 23 bp, Glycine max
  source 1..23: mol_type = genomic DNA
tgaagacgccagcactaatggca

SEQ ID NO: 2210 - DNA, 23 bp, Glycine max
  source 1..23: mol_type = genomic DNA
tgaagacggaagctcggaggaca

SEQ ID NO: 2211 - DNA, 23 bp, Glycine max
  source 1..23: mol_type = genomic DNA
tgaagacggaagctctgagaaaa

SEQ ID NO: 2212 - DNA, 23 bp, Glycine max
  source 1..23: mol_type = genomic DNA
tgaagacgtaaccactgatacca

SEQ ID NO: 2213 - DNA, 23 bp, Glycine max
  source 1..23: mol_type = genomic DNA
tgaagacgtaagaacgaacgaag

SEQ ID NO: 2214 - DNA, 23 bp, Glycine max
  source 1..23: mol_type = genomic DNA
tgaagatgtaaagactgaagaca

SEQ ID NO: 2215 - DNA, 23 bp, Glycine max
  source 1..23: mol_type = genomic DNA
tgaagatgtatgcactaactaca

SEQ ID NO: 2216 - DNA, 23 bp, Glycine max
  source 1..23: mol_type = genomic DNA
tgaagtcataggcaatgaagaca

SEQ ID NO: 2217 - DNA, 23 bp, Glycine max
  source 1..23: mol_type = genomic DNA
tgaagtcgcaagcaaagatgaca

SEQ ID NO: 2218 - DNA, 23 bp, Glycine max
  source 1..23: mol_type = genomic DNA
tgaagtcgcaagcagtgacgata

SEQ ID NO: 2219 - DNA, 23 bp, Glycine max
  source 1..23: mol_type = genomic DNA
tgacgtcgtaagcaatgacgcaa

SEQ ID NO: 2220 - DNA, 23 bp, Glycine max
  source 1..23: mol_type = genomic DNA
tgaggaagtaagctccgacaaca

SEQ ID NO: 2221 - DNA, 23 bp, Glycine max
  source 1..23: mol_type = genomic DNA
tgcttatgtaagcactgacgact

SEQ ID NO: 2222 - DNA, 23 bp, Glycine max
  source 1..23: mol_type = genomic DNA
tggacacgaaagcagtgacgtca

SEQ ID NO: 2223 - DNA, 23 bp, Glycine max
  source 1..23: mol_type = genomic DNA
tggtgacgtaagcactgatgtaa

SEQ ID NO: 2224 - DNA, 23 bp, Glycine max
  source 1..23: mol_type = genomic DNA
tgtagacataaccacggacgtca

SEQ ID NO: 2225 - DNA, 20 bp, Glycine max
  source 1..20: mol_type = genomic DNA
tgacgtaagcaaggacgtca

SEQ ID NO: 2226 - DNA, 20 bp, Glycine max
  source 1..20: mol_type = genomic DNA
aaacgtaatccatgacgtct

SEQ ID NO: 2227 - DNA, 20 bp, Glycine max
  source 1..20: mol_type = genomic DNA
tgacgtaagccactacgtgc

SEQ ID NO: 2228 - DNA, 20 bp, Glycine max
  source 1..20: mol_type = genomic DNA
tgacgtattccatgacgtat

SEQ ID NO: 2229 - DNA, 20 bp, Glycine max
  source 1..20: mol_type = genomic DNA
ttacgtaagtcgtgacgtct

SEQ ID NO: 2230 - DNA, 20 bp, Glycine max
  source 1..20: mol_type = genomic DNA
tgacgtaagcagagacgtat

SEQ ID NO: 2231 - DNA, 20 bp, Glycine max
  source 1..20: mol_type = genomic DNA
ttacgtttgccattacgtct

SEQ ID NO: 2232 - DNA, 20 bp, Glycine max
  source 1..20: mol_type = genomic DNA
tgacgtatgctattacgcct

SEQ ID NO: 2233 - DNA, 29 bp, Glycine max
  source 1..29: mol_type = genomic DNA
aagataagataataatgttgaagataaga

SEQ ID NO: 2234 - DNA, 29 bp, Glycine max
  source 1..29: mol_type = genomic DNA
aagataagataaaagatttaaagataaga

SEQ ID NO: 2235 - DNA, 29 bp, Glycine max
  source 1..29: mol_type = genomic DNA
aagataagagattaaagtaaaagataaga

SEQ ID NO: 2236 - DNA, 29 bp, Glycine max
  source 1..29: mol_type = genomic DNA
aagataagataaaaaagtaaaagataaga

SEQ ID NO: 2237 - DNA, 24 bp, Glycine max
  source 1..24: mol_type = genomic DNA
aagataagaaagtaaaagataaga

SEQ ID NO: 2238 - DNA, 35 bp, Glycine max; identical to SEQ ID NO: 521
  source 1..35: mol_type = genomic DNA

SEQ ID NO: 2239 - DNA, 35 bp, synthetic construct; identical to SEQ ID NO: 522
  misc_feature 1..35: note = cis-acting regulatory element for use in chimeric regulatoryelements
  source 1..35: mol_type = other DNA

SEQ ID NO: 2240 - DNA, 29 bp, synthetic construct
  misc_feature 1..29: note = cis-acting regulatory element for use in chimeric regulatoryelements
  source 1..29: mol_type = other DNA
aagataagataataatgatgaagataaga

SEQ ID NO: 2241 - DNA, 29 bp, synthetic construct
  misc_feature 1..29: note = cis-acting regulatory element for use in chimeric regulatoryelements
  source 1..29: mol_type = other DNA
aagataagataataatgataaagataaga

SEQ ID NO: 2242 - DNA, 29 bp, Pisum sativum
  source 1..29: mol_type = genomic DNA
aagataagataataatgtagaagataaga

SEQ ID NO: 2243 - DNA, 17 bp, Glycine max
  source 1..17: mol_type = genomic DNA
ttgatctagtagataaa

SEQ ID NO: 2244 - DNA, 17 bp, Glycine max
  source 1..17: mol_type = genomic DNA
ttgatctagtatataaa

SEQ ID NO: 2245 - DNA, 17 bp, Glycine max
  source 1..17: mol_type = genomic DNA
ttgatctagtagttaaa

SEQ ID NO: 2246 - DNA, 17 bp, Glycine max
  source 1..17: mol_type = genomic DNA
gtgatctactagataaa

SEQ ID NO: 2247 - DNA, 17 bp, Glycine max
  source 1..17: mol_type = genomic DNA
ttgatgtagtagataat

SEQ ID NO: 2248 - DNA, 17 bp, Aglaonema bacilliform virus
  source 1..17: mol_type = genomic DNA
atgatctagaagataaa

SEQ ID NO: 2249 - DNA, 20 bp, Aglaonema bacilliform virus
  source 1..20: mol_type = genomic DNA
tgaagaaaacccttatgtgg

SEQ ID NO: 2250 - DNA, 20 bp, Bougianvillea chlorotic vein banding virus
  source 1..20: mol_type = genomic DNA
tacgtaaactcctaagccgt

SEQ ID NO: 2251 - DNA, 20 bp, Commelina sp.
  source 1..20: mol_type = genomic DNA
tgacggatgcaatgacgtca

SEQ ID NO: 2252 - DNA, 22 bp, Gooseberry vein banding associated virus
  source 1..22: mol_type = genomic DNA
tgattcgtcatcgcttacgcca

SEQ ID NO: 2253 - DNA, 20 bp, Grapevine clearning virus
  source 1..20: mol_type = genomic DNA
tgacgtaagcaatgacgact

SEQ ID NO: 2254 - DNA, 20 bp, Dahlia mosaic virus
  source 1..20: mol_type = genomic DNA
agacgtcagcagtgacgaac

SEQ ID NO: 2255 - DNA, 20 bp, Dahlia mosaic Virus
  source 1..20: mol_type = genomic DNA
aaacgtcagcaatgacgtca

SEQ ID NO: 2256 - DNA, 20 bp, Eupatorium vein-clearing virus
  source 1..20: mol_type = genomic DNA
aaacgtcatccatgacgttt

SEQ ID NO: 2257 - DNA, 20 bp, Rudbeckia flower distortion virus
  source 1..20: mol_type = genomic DNA
agacgtaagccatgacgtca

SEQ ID NO: 2258 - DNA, 20 bp, Strawberry vein banding virus
  source 1..20: mol_type = genomic DNA
tgaagataagactgacccca

SEQ ID NO: 2259 - DNA, 23 bp, Cassava vein mosaic virus
  source 1..23: mol_type = genomic DNA
tgaagacgtaagcactgacgaca

SEQ ID NO: 2260 - DNA, 20 bp, Sweet potato collusive virus
  source 1..20: mol_type = genomic DNA
tgacgcaggcgatgacgtca

SEQ ID NO: 2261 - DNA, 20 bp, Petunia vein clearing virus
  source 1..20: mol_type = genomic DNA
tgatgtaagtgcttacgtct

SEQ ID NO: 2262 - DNA, 20 bp, Blueberry red ringspot virus
  source 1..20: mol_type = genomic DNA
tgacgtaagtttacacttcg

SEQ ID NO: 2263 - DNA, 20 bp, Cestrum yellow leaf curling virus
  source 1..20: mol_type = genomic DNA
tgacgtaagggcttacgaaa

SEQ ID NO: 2264 - DNA, 20 bp, Peanut chlorotic streak virus
  source 1..20: mol_type = genomic DNA
tgacgtaagggcttacgcca

SEQ ID NO: 2265 - DNA, 20 bp, Soybean chlorotic mottle virus
  source 1..20: mol_type = genomic DNA
tgaacgtcagcaatgacgaa

SEQ ID NO: 2266 - DNA, 25 bp, Water chestnut soymovirus 1
  source 1..25: mol_type = genomic DNA
tggagaggaatcagcccgtgacgac

SEQ ID NO: 2267 - DNA, 23 bp, synthetic construct
  misc_feature 1..23: note = cis-acting regulatory element for use in chimeric regulatoryelements
  source 1..23: mol_type = other DNA
tttatttaccaaacggtaacatc

SEQ ID NO: 2268 - DNA, 23 bp, synthetic construct
  misc_feature 1..23: note = cis-acting regulatory element for use in chimeric regulatoryelements
  source 1..23: mol_type = other DNA
gacgtgtaaagtaaatttacaac

1. A chimeric regulatory molecule wherein the molecule comprises a nucleic acid sequence comprising at least 95% identity to SEQ ID NO:9, SEQ ID NOs:25-583, SEQ ID NOs:585-2268.

2. The chimeric regulatory molecule of claim 1, comprising SEQ ID NO:9, SEQ ID NOs:25-583, SEQ ID NOs:585-2268.

3. The chimeric regulatory molecule of claim 1, consisting of SEQ ID NO:9, SEQ ID NOs:25-583, SEQ ID NOs:585-2268.

4. The chimeric regulatory molecule of claim 1, wherein the nucleic acid sequence comprising at least 95% identity to SEQ ID NO:9, SEQ ID NOs:25-583, SEQ ID NOs:585-2268 is an enhancer.

5. The chimeric regulatory molecule of claim 1, comprising a promoter operably linked to the nucleic acid sequence comprising at least 95% identity to SEQ ID NO:9, SEQ ID NOs:25-583, SEQ ID NOs:585-2268.

6. A gene expression cassette comprising the chimeric regulatory molecule of claim 1.

7. The gene expression cassette of claim 6, wherein the nucleic acid sequence comprising at least 95% identity to SEQ ID NO:9, SEQ ID NOs:25-583, SEQ ID NOs:585-2268 is operably linked to a promoter, intron, of 5′UTR.

8. The gene expression cassette of claim 6, wherein the chimeric regulatory molecule is operably linked to a heterologous coding sequence.

9. The gene expression cassette of claim 8, wherein the heterologous coding sequence is a gene of interest.

10. The gene expression cassette of claim 9, wherein the gene of interest encodes a selectable marker protein, an insecticidal resistance protein, a herbicide tolerance protein, a nitrogen use efficiency protein, a water use efficiency protein, a small RNA molecule, a nutritional quality protein, or a DNA binding protein.

11. The gene expression cassette of claim 6, wherein the gene expression cassette is engineered within a recombinant vector.

12. The gene expression cassette of claim 11, wherein the vector is selected from the group consisting of a plasmid, a cosmid, a bacterial artificial chromosome, a virus, and a bacteriophage.

13. A transgenic plant cell comprising the gene expression cassette of claim 6.

14. The transgenic plant cell of claim 13, wherein said plant cell is a monocotyledonous plant.

15. The transgenic plant cell of claim 13, wherein said plant cell is a dicotyledonous plant.

16. The transgenic plant of claim 13, wherein the gene expression cassette is expressed constitutively.

17. A transgenic plant stably transformed with the gene expression cassette of claim 6.

18. The transgenic plant of claim 17, wherein said plant is a monocotyledonous plant.

19. The transgenic plant of claim 17, wherein said plant is a dicotyledonous plant.

20. The transgenic plant of claim 17, wherein the gene expression cassette is expressed constitutively.
